(19) United States
(12) Patent Application Publication
(10) Pub. No.: US 2021/0009505 A1
(43) Pub. Date: Jan. 14, 2021

(54) CATIONIC LIPIDS AND TRANSFECTION METHODS

(71) Applicant: Factor Bioscience Inc., Cambridge, MA (US)

(72) Inventors: Matthew ANGEL, Cambridge, MA (US); Franklin Kostas, Cambridge, MA (US); Christopher Rohde, Cambridge, MA (US)

(21) Appl. No.: 16/920,556

(22) Filed: Jul. 3, 2020

Related U.S. Application Data
(60) Provisional application No. 63/023,654, filed on May 12, 2020.
(60) Provisional application No. 62/880,435, filed on Jul. 30, 2019.
(60) Provisional application No. 62/870,245, filed on Jul. 3, 2019.

(51) Int. Cl. C07C 215/24; A61K 9/10; A61K 9/00; A61K 47/54

(52) U.S. Cl. CPC C07C 215/24; A61K 47/543; A61K 9/0021; A61K 9/10

(57) ABSTRACT

The present invention relates in part to novel cationic lipids and their use, e.g., in delivering nucleic acids to cells.

### PRIORITY

[0001] The present application claims priority to U.S. patent application Ser. No. 16/746,279, filed on Jan. 17, 2020, U.S. Provisional Application No. 62/870,245, filed on Jul. 3, 2019, U.S. Provisional Application No. 62/880,435, filed on Jul. 30, 2019, and U.S. Provisional Application No. 63/023,654, filed on May 12, 2020, the contents of which are herein incorporated by reference in their entireties.

### FIELD OF THE INVENTION

[0002] The present invention relates, in part, to various novel lipids, including methods, compositions, and products for delivering nucleic acids to cells.

### DESCRIPTION OF THE TEXT FILE SUBMITTED ELECTRONICALLY

[0003] The instant application contains a Sequence Listing which has been submitted in ASCII format via EFS-Web and is hereby incorporated by reference in its entirety. Said ASCII copy, created on Jul. 3, 2020, is named FAB-012US_ST25.txt and is 1,441,638 bytes in size.

### BACKGROUND

[0004] Lipid-based materials, such as liposomes, are used as biological carriers for pharmaceutical and other biological applications, e.g., to introduce agents into cultured cell lines. Lipids are commonly used to deliver nucleic acids to cells in vitro under low-serum or serum-free conditions, for instance in transfection. However, serum components inhibit the activity of many lipids, limiting their use in the presence of serum, both in vitro and in vivo. Improved lipid delivery systems, e.g., to achieve higher levels of transfection both in vitro and in vivo, are desirable.

[0005] In particular, lipid delivery systems that are active in the presence of serum are needed. Improved levels of transfection will allow the treatment of disease states for which higher levels of expression than are currently achievable with lipid delivery systems are needed for therapeutic effect. Alternatively, higher transfection levels will allow for use of smaller amounts of material to achieve comparable expression levels, thereby decreasing potential toxicities and decreasing cost.

[0006] There is a need for novel lipids, lipid-like materials, and lipid-based delivery systems in the art.

### SUMMARY OF THE INVENTION

[0007] Accordingly, the present invention relates to new lipids that find use, inter a/ia, in improved delivery of biological payloads, e.g. nucleic acids, to cells.

[0008] In aspects, the present invention relates to a compound of Formula (I)

[chemical structure]

wherein: Q₁, Q₂, Q₃, and Q₄ are independently an atom or group capable of adopting a positive charge;
A₁ and A₂ are independently null, H, or optionally substituted C₁-C₆ alkyl;
L₁, L₂, and L₃ are independently null, a bond, (C₁-C₂₀)alkanediyl, (halo)(C₁-C₂₀)alkanediyl, (hydroxy)(C₁-C₂₀)alkanediyl, (alkoxy)(C₁-C₂₀)alkanediyl, arylene, heteroarylene, cycloalkanediyl, heterocycle-diyl, or any combination of the aforementioned optionally linked by one or more of an ether, an ester, an anhydride, an amide, a carbamate, a secondary amine, a tertiary amine, a quaternary ammonium, a thioether, a urea, a carbonyl, or an imine;
R₁, R₂, R₃, R₄, R₅, R₆, R₇, and R₈ are independently null, H, (C₁-C₆₀)alkyl, (halo)(C₁-C₆₀)alkyl, (hydroxy)(C₁-C₆₀)alkyl, (alkoxy)(C₁-C₆₀)alkyl, (C₂-C₆₀)alkenyl, (halo)(C₂-C₆₀)alkenyl, (hydroxy)(C₂-C₆₀)alkenyl, (alkoxy)(C₂-C₆₀)alkenyl, (C₂-C₆₀)alkynyl, (halo)(C₂-C₆₀)alkynyl, (hydroxy)(C₂-C₆₀)alkynyl, (alkoxy)(C₂-C₆₀)alkynyl, wherein at least one of R₁, R₂, R₃, R₄, R₅, R₆, R₇, and R₈ comprises at least two unsaturated bonds; and x, y, and z are independently 0, 1, 2, 3, 4, 5, 6, 7, 8, 9, 10, 11, 12, 13, 14, or 15.

[0009] In aspects, the present invention relates to a compound of Formula (ID:

[chemical structure]

wherein:
R9, R10, R11, R12, R13, R14, R15, R16, R17, R18, R19, R20, R21, R22, R23, R24, R25, R26, R27, and R28 are independently H, halo, OH, (C₁-C₆)alkyl, (halo)(C₁-C₆)alkyl, (hydroxy)(C₁-C₆)alkyl, (alkoxy)(C₁-C₆)alkyl, aryl, heteroaryl, cycloalkyl, or heterocyclo; and
j, k, m, s, and t are independently 0, 1, 2, 3, 4, 5, 6, 7, 8, 9, 10, 11, 12, 13, 14, or 15.

[0010] In aspects, the present invention relates to a compound of Formula (III):

[chemical structure]

wherein L₄, L₅, L₆, and L₇ are independently a bond, (C₁-C₂₀)alkanediyl, (halo)(C₁-C₂₀)alkanediyl, (hydroxy)(C₁-C₂₀)alkanediyl, (alkoxy)(C₁-C₂₀)alkanediyl, arylene, heteroarylene, cycloalkanediyl, heterocycle-diyl, —(CH₂)ᵥ₁—C(O)—, —((CH₂)ᵥ₁—O)ᵥ₂—, or —((CH₂)ᵥ₁—C(O)—O)ᵥ₂—;
R₂₉, R₃₀, R₃₁, R₃₂, R₃₃, R₃₄, and R₃₅ are independently H, (C₁-C₆₀)alkyl, (halo)(C₁-C₆₀)alkyl, (hydroxy)(C₁-C₆₀)alkyl, (alkoxy)(C₁-C₆₀)alkyl, (C₂-C₆₀)alkenyl, (halo)(C₂-C₆₀)alkenyl, (hydroxy)(C₂-C₆₀)alkenyl, (alkoxy)(C₂-C₆₀)alkenyl, (C₂-C₆₀)alkynyl, (halo)(C₂-C₆₀)alkynyl, (hydroxy)(C₂-C₆₀)alkynyl, (alkoxy)(C₂-C₆₀)alkynyl, wherein at least one of R₂₉, R₃₀, R₃₁, R₃₂, R₃₃, R₃₄, and R₃₅ comprises at least two unsaturated bonds;
v, v₁ and v₂ are independently 0, 1, 2, 3, 4, 5, 6, 7, 8, 9, 10, 11, 12, 13, 14, or 15.

[0011] In embodiments, the present invention relates to a compound of Formula (IV):

[chemical structure]

wherein n is 1, 2, 3, 4, 5, 6, 7, 8, 9, 10, 11, 12, 13, 14, or 15.

[0012] In embodiments, the present invention relates to a compound of Formula (V):

[chemical structure]

[0013] In embodiments, the present invention relates to a compound of Formula (VD:

[chemical structure]

[0014] In embodiments, the present invention relates to a compound of Formula (VII):

[chemical structure]

[0015] In embodiments, the present invention relates to a compound of Formula (VIM):

[chemical structure]

[0016] In embodiments, the present invention relates to a compound of Formula (IX):

[chemical structure]

[0017] In embodiments, the present invention relates to a compound of Formula (X):

[chemical structure]

[0018] In embodiments, the present invention relates to a compound of Formula (XI):

[chemical structure]

[0019] In embodiments, the present invention relates to a compound of Formula (XII):

[chemical structure]

[0020] In embodiments, the present invention relates to a compound of Formula (XIII):

[chemical structure]

[0021] In embodiments, the present invention relates to a compound of Formula (XIV):

[chemical structure]

[0022] In embodiments, the present invention relates to a compound of Formula (XV):

[chemical structure]

wherein n is 1, 2, 3, 4, 5, 6, 7, 8, 9, 10, 11, 12, 13, 14, or 15.

[0023] In embodiments, the present invention relates to a compound of Formula (XVI):

[chemical structure]

[0024] In embodiments, the present compounds (e.g. of Formulae I-XVI) are components of a pharmaceutical composition and/or a lipid aggregate and/or a lipid carrier and/or a lipid nucleic-acid complex and/or a liposome and/or a lipid nanoparticle.

[0025] In embodiments, the present compounds (e.g. of Formulae I-XVI) are components of a pharmaceutical composition and/or a lipid aggregate and/or a lipid carrier and/or a lipid nucleic-acid complex and/or a liposome and/or a lipid nanoparticle which does not require an additional or helper lipid. In embodiments, the present compounds (e.g. of Formulae I-XVI) are components of a pharmaceutical composition and/or a lipid aggregate and/or a lipid carrier and/or a lipid nucleic-acid complex and/or a liposome and/or a lipid nanoparticle that further comprises a neutral lipid (e.g. dioleoylphosphatidylethanolamine (DOPE), 1,2-Dioleoyl-sn-glycero-3-phosphocholine (DOPC), or cholesterol) and/or a further cationic lipid (e.g. N-[1-(2,3-dioleoyloxy)propyl]-N,N,N-trimethylammonium chloride (DOTMA), 1,2-bis(oleoyloxy)-3-3-(trimethylammonium) propane (DOTAP), or 1,2-dioleoyl-3-dimethylammonium-propane (DODAP)).

[0026] In embodiments, the present compounds (e.g. of Formulae I-XVI) are components of a pharmaceutical composition and/or a lipid aggregate and/or a lipid carrier and/or a lipid nucleic-acid complex and/or a liposome and/or a lipid nanoparticle with a defined particle size. In some embodiments, the particles comprising the present compounds (e.g. of Formulae I-XVI) are characterized to determine mean particle size and polydispersity. In some embodiments, particles comprising the present compounds have a mean hydrodynamic radius of <50 nm, 50-100 nm, 100-150 nm, 150-200 nm, 200-250 nm, 250-500 nm, or >500 nm. In some embodiments, the mean particle size is dependent on conditions of the process of particle formation (e.g., without limitation, temperature, incubation time, solution pH, or solution ionic strength). In some embodiments, the present compounds (e.g. of Formulae I-XVI) are components of a pharmaceutical composition and/or a lipid aggregate and/or a lipid carrier and/or a lipid nucleic-acid complex and/or a liposome and/or a lipid nanoparticle with a mean particle size that is dependent on the ionic strength of the solution, or on the pH of the solution.

[0027] In embodiments, the present compounds (e.g. of Formulae I-XVI) are components of a pharmaceutical composition and/or a lipid aggregate and/or a lipid carrier and/or a lipid nucleic-acid complex and/or a liposome and/or a lipid nanoparticle which comprises a nucleic acid, such as DNA (e.g., without limitation, a plasmid, cosmid, phage, recombinant virus or other vector) or RNA (e.g., without limitation, an siRNA, micro-RNA (miRNA), long non-coding RNA (IncRNA), an in vitro-transcribed RNA, a synthetic RNA, and/or an mRNA, in each case that comprises one or more non-canonical nucleotides that confer stability, avoid degradation by one or more nucleases, and/or avoid substantial cellular toxicity, or does not comprise a non-canonical nucleotide). In embodiments, the RNA encodes a protein of interest, e.g., without limitation, one or more reprogramming factors or gene-editing proteins. In embodiments, the RNA encodes an antigen which provokes an immune response.

[0028] In embodiments, the invention relates to the delivery of synthetic RNA molecules that are capable of inducing immunotoleration to an encoded protein (e.g., without limitation, a synthetic RNA molecule comprising a microRNA binding site (such as, for instance a miR142 micro-RNA binding site), such microRNA binding site optionally being present in the 3′-UTR of the synthetic RNA molecule (optionally in one or more copies). In embodiments, the invention relates to the delivery of synthetic RNA molecules that are capable of inducing immunotoleration to an encoded protein by co-delivery of a factor that induces tolerance (e.g., without limitation, IL2, IL10, and/or tgf-β). In certain embodiments the co-delivered factors are expressed by synthetic RNA molecules. In embodiments, the synthetic RNA molecules encode one or more gene-editing proteins described herein. In one embodiment, the synthetic RNA molecule induces immunotoleration of the one or more gene-editing proteins. In another embodiment, the synthetic RNA molecule encodes a protein that is not normally present in the subject. In some embodiments, the subject has dystrophic epidermolysis bullosa. In other embodiments, the synthetic RNA molecule encodes one or more gene-editing proteins that create a double-strand break into which a genetic payload is inserted. In some embodiments the genetic payload comprises an expression cassette. In other embodiments, the expression cassette induces the cell to express a therapeutic protein. In still other embodiments, the therapeutic protein is immunotolerated. In further embodiments, the one or more gene-editing proteins induce the cell to express a functional or semi-functional version of a protein. In one embodiment, the protein is collagen 7. Certain embodiments are directed to a composition for treating a disease, disorder, or condition, wherein the composition comprises a synthetic RNA molecule of the present invention. In one embodiment, the disease, disorder, or condition is dystrophic epidermolysis bullosa.

[0029] In embodiments, the pharmaceutical composition and/or lipid aggregate and/or lipid carrier and/or lipid nucleic-acid complex and/or liposome and/or lipid nanoparticle is suitable for administration by injection, e.g., without limitation, subcutaneous injection, intradermal injection, subdermal injection, intramuscular injection, and/or intravenous, intrathecal, intratumoral, intravitreal, subretinal, intracerebroventricular, and/or topical administration and/or infusion. In embodiments, the pharmaceutical composition and/or a lipid aggregate and/or a lipid carrier is suitable for administration as one or more injections containing less than about 10 ng of RNA or about 10 ng to about 2000 ng of RNA.

[0030] In aspects, the present invention relates to a method for transfecting a cell with a nucleic acid, comprising contacting the cell with a complex of the nucleic acid and a compound described herein (e.g. of Formulae I-XVI), where the complex of the nucleic acid and the compound described herein (e.g. of Formulae I-XVI) is optionally formed prior to contact with the cell.

[0031] In aspects, the present invention relates to a method for reprogramming a differentiated cell to a less differentiated state, comprising (a) providing a differentiated cell; (b) culturing the differentiated cell; and (c) transfecting the differentiated cell with a complex of one or more synthetic RNA molecules and a compound described herein (e.g. of Formulae I-XVI), where the one or more synthetic RNA molecules include at least one RNA molecule encoding one or more reprogramming factors and where the transfection results in the cell expressing the one or more reprogramming factors, to result in the cell being reprogrammed to a less differentiated state. In embodiments, step (c) occurs in the presence of a medium containing ingredients that support reprogramming of the differentiated cell to a less differentiated state. In embodiments, the further comprises repeating step (c) at least twice during 5 consecutive days. In embodiments, the amount of one or more synthetic RNA molecules transfected in one or more later transfections is greater than the amount transfected in one or more earlier transfections. In embodiments, steps (a)-(c) are performed without using feeder cells and occur in the presence of a feeder cell conditioned medium. In embodiments, step (c) is performed without using irradiated human neonatal fibroblast feeder cells and occurs in the presence of a feeder cell conditioned medium. In embodiments, the synthetic RNA molecule encodes one or more reprogramming factor(s) selected from Oct4, Sox2, Klf4, c-Myc, I-Myc, Tert, Nanog, Lin28, Utf1, Aicda, miR200 micro-RNA, miR302 micro-RNA, miR367 micro-RNA, miR369 micro-RNA and biologically active fragments, analogues, variants and family-members thereof.

[0032] In aspects, the present invention relates to a method for reprogramming a non-pluripotent cell, comprising (a) providing a non-pluripotent cell; (b) culturing the cell; and (c) transfecting the cell with a complex of one or more synthetic RNA molecules and a compound described herein (e.g. of Formulae I-XVI), where the one or more synthetic RNA molecules include at least one RNA molecule encoding one or more reprogramming factors and where the transfecting results in the cell expressing the one or more reprogramming factors, to result in the cell being reprogrammed. In embodiments, step (c) occurs in the presence of a medium containing ingredients that support reprogramming of the non-pluripotent cell. In embodiments, the further comprises repeating step (c) at least twice during 5 consecutive days. In embodiments, the amount of one or more synthetic RNA molecules transfected in one or more later transfections is greater than the amount transfected in one or more earlier transfections. In embodiments, steps (a)-(c) are performed without using feeder cells and occur in the presence of a feeder cell conditioned medium. In embodiments, step (c) is performed without using irradiated human neonatal fibroblast feeder cells and occurs in the presence of a feeder cell conditioned medium. In embodiments, the synthetic RNA molecule encodes one or more reprogramming factor(s) selected from Oct4, Sox2, Klf4, c-Myc, I-Myc, Tert, Nanog, Lin28, Utf1, Aicda, miR200 micro-RNA, miR302 micro-RNA, miR367 micro-RNA, miR369 micro-RNA and biologically active fragments, analogues, variants and family-members thereof.

[0033] In aspects, the present invention relates to a method for gene-editing a cell, comprising transfecting the cell with a complex of one or more synthetic RNA molecules and a compound described herein (e.g. of Formulae I-XVI), where the one or more synthetic RNA molecules include at least one RNA molecule encoding one or more gene-editing proteins selected from a nuclease, a transcription activator-like effector nuclease (TALEN), a zinc-finger nuclease, a meganuclease, a nickase, a gene-editing protein disclosed in WO2014/071219A1, the entirety of which is incorporated herein by reference, a clustered regularly interspaced short palindromic repeat (CRISPR)-associated protein, CRISPR/Cas9, Cas9, xCas9, Cas12a (Cpf1), Cas13a, Cas14, CasX, CasY, a Class 1 Cas protein, a Class 2 Cas protein, and MAD7, or a natural or engineered variant, family-member, orthologue, fragment or fusion construct thereof.

[0034] In aspects, the present invention relates to a method for reprogramming and/or gene-editing a cell, comprising contacting the cell with a complex of the nucleic acid and a compound described herein (e.g. of Formulae I-XVI) and/or a compound disclosed in US2009/0143583A1, the entirety of which is incorporated herein by reference.

[0035] In aspects, the present invention relates to a pharmaceutical formulation comprising a nucleic acid of the present invention and a compound described herein (e.g. of Formulae I-XVI) and/or a compound disclosed in US2009/0143583A1, the entirety of which is incorporated herein by reference.

[0036] In embodiments, the new lipids are useful for delivery of vaccines. In aspects, the present invention relates to a method of vaccinating against an infectious disease (without limitation a coronavirus infection, e.g. COVID-19) comprising contacting the cell with a complex of the nucleic acid encoding an antigen of the infectious agent and a compound described herein (e.g. of Formulae I-XVI).

[0037] In aspects, the present invention relates to a method for extracting an organic compound from a reaction containing lithium aluminum hydride and a solvent comprising: (a) quenching the reaction with water; (b) removing the solvent; (c) removing excess water; and (d) extracting the organic compound with an alcohol (optionally isopropyl alcohol); to yield an extracted organic compound.

[0038] In aspects, the present invention relates to a method for extracting an organic compound from a reaction containing a water-reactive compound and a first solvent comprising: (a) quenching the reaction with water; (b) removing the first solvent; (c) removing excess water; and (d) extracting the organic compound with a second solvent; to yield an extracted organic compound.

[0039] In aspects, the present invention relates to a method for purifying an organic compound from a mixture of the organic compound and a phthalimide or phthalimide derivative (optionally phthalhydrazide) comprising: (a) dissolving the mixture in acetone to form a precipitate; (b) removing the precipitate by centrifugation; and (c) removing the acetone; to yield a purified organic compound.

[0040] The details of the invention are set forth in the accompanying description below. Although methods and materials similar or equivalent to those described herein can be used in the practice or testing of the present invention, illustrative methods and materials are now described. Other features, objects, and advantages of the invention will be apparent from the description and from the claims. In the specification and the appended claims, the singular forms also include the plural unless the context clearly dictates otherwise. Unless defined otherwise, all technical and scientific terms used herein have the same meaning as commonly understood by one of ordinary skill in the art to which this invention belongs.

[0041] Any aspect or embodiment disclosed herein can be combined with any other aspect or embodiment as disclosed herein.

### DETAILED DESCRIPTION OF THE FIGURES

[0042] FIG. 1 depicts primary human epidermal keratinocytes cultured in a 24-well plate, and transfected with 400 ng per well of in vitro transcribed RNA encoding green fluorescent protein (GFP) complexed with the indicated lipid and with the indicated mass ratio of lipid to RNA. Complexation was performed in DMEM, and transfections were performed in 100% fetal bovine serum (FBS). Images were taken eight hours following transfection.

[0043] FIG. 2 depicts the experiment of FIG. 1, with florescence measured at the indicated time points following transfection using DHDLinS.

[0044] FIG. 3 depicts the results of an experiment conducted as in FIG. 1, but with the indicated amounts of RNA (in nanograms) and the indicated lipid-to-RNA mass ratios (in micrograms of lipid per microgram of RNA). Images were taken 16 hours following transfection. As shown in the figure, all RNA amounts and lipid-to-RNA mass ratios tested yielded a fluorescent signal.

[0045] FIG. 4 depicts the results of an experiment conducted as in FIG. 1, but with human peripheral blood mononuclear cells (hPBMCs) instead of keratinocytes. Images were taken 16 hours following transfection. “LF3000” indicates cells transfected with LIPOFECTAMINE 3000 commercial transfection reagent. “Neg.” indicates un-transfected cells as compared to cells transfected with DHDLinS.

[0046] FIG. 5A depicts the results of an experiment conducted as in FIG. 4, but with a confluent layer of primary human epidermal keratinocytes instead of hPBMCs. Images were taken 24 hours following transfection.

[0047] FIG. 5B depicts the experiment of FIG. 5A, shown at higher magnification.

[0048] FIG. 6 depicts the results of an experiment conducted as in FIG. 4, but with primary human adult dermal fibroblasts instead of hPBMCs. Images were taken 16 hours following transfection.

[0049] FIG. 7 depicts the experiment of FIG. 6, shown at higher magnification.

[0050] FIG. 8 depicts the results of an experiment conducted as in FIG. 3, but with DHDLinS purified by extraction with acetone as described in Example 6.

[0051] FIG. 9 depicts the results of an experiment in which primary human epidermal keratinocytes were transfected with in vitro transcribed RNA encoding gene-editing proteins complexed with DHDLinS.

[0052] FIG. 10 depicts the results of an experiment in which primary human epidermal keratinocytes were transfected with in vitro transcribed RNA encoding GFP and complexed with DLinDHS. The RNA-DLinDHS complexes were added to 20,000 human epidermal keratinocytes in serum-free medium (0% fetal bovine serum (FBS)) or 50% FBS. Images were taken 16 hours following transfection. “MC3 LNP” denotes cells transfected using GFP RNA formulated using a microfluidic device into lipid nanoparticles composed of DLin-MC3-DMA, DOPE, cholesterol, and DMPE-PEG in a molar ratio of 30:30:38.5:1.5.

[0053] FIG. 11A illustrates the results of an experiment in which primary human dermal fibroblasts were transfected with in vitro transcribed RNA encoding GFP and complexed with DLinDHS. Of the GFP-encoding RNA, 20% was labeled with CyS. The RNA-DLinDHS complexes were added to 20,000 human dermal fibroblasts in 10% FBS. Images were taken 50 minutes, 100 minutes, 150 minutes, 200 minutes, 250 minutes, and 300 minutes following transfection.

[0054] FIG. 11B illustrates the results of an experiment in which primary human dermal fibroblasts were transfected with in vitro transcribed RNA encoding GFP and complexed with DLinDHS. Of the DLinDHS, 10% was labeled with a BODIPY fluorescent tag. The RNA-DLinDHS complexes were added to 20,000 human dermal fibroblasts in 10% FBS. Images were taken in the BODIPY channel at the time of transfection (“0 min”), and at 20 minutes, 40 minutes, 60 minutes, 80 minutes, 100 minutes, 120 minutes, and 140 minutes following transfection.

[0055] FIG. 12 illustrates a schematic of a synthesis of DLinDHS.

[0056] FIG. 13 illustrates the results of an experiment in which primary human epidermal keratinocytes were transfected with in vitro transcribed RNA encoding GFP and complexed with compounds of the invention, comprising a dihydroxyspermine headgroup conjugated to different fatty-acid derived tails, including myristyl, oleyl, linoleyl, and linolenyl. The graph illustrates fluorescence (a.u.) versus the time after transfection (hours) for the studied complexes and for RNA complexed with LIPOFECTAMINE 2000.

[0057] FIG. 14 illustrates the results of an experiment in which primary human epidermal keratinocytes were transfected with in vitro transcribed RNA encoding GFP and complexed with compounds of the invention, comprising a dilinoleyl fatty-acid derived tail structure. The tested compounds' structure is a bis-(2-hydroxy-3-aminopropyl)-N,N′-dilinoleyl-diamine as shown, with the labels indicating the length of the central inter-amino carbon chain of the headgroup (n on the structure). The graph illustrates fluorescence (a.u.) versus the time after transfection (hours) for the studied complexes and for RNA complexed with LIPOFECTAMINE 2000.

[0058] FIG. 15 depicts a graph illustrating a Z-average particle size (nm) and polydispersity index (PDI) of several DLinDHS/RNA complexes, versus ionic strength ([NaCl], mM) of complexation medium. Complexes were formed by diluting lipid into complexation medium, an aqueous RNA solution having the indicated ionic strength.

[0059] FIG. 16 depicts a graph illustrating zeta potential (mV) of DLinDHS/RNA complexes diluted into 20 mM buffer titrated to the indicated pH.

[0060] FIG. 17 illustrates images of DLinDHS/RNA complexes without treatment with RNase A (“No treatment”), DLinDHS/RNA complexes treated with RNase A after complexation (“RNase after complexation”), and DLinDHS complexed with RNA treated with RNase A prior to complexation (“RNase before complexation”).

[0061] FIG. 18 illustrates the results of transfection of in vitro transcribed RNA encoding GFP, complexed with DLinDHS in primary human dermal fibroblasts, activated human peripheral blood mononuclear cells (PBMCs), human lung adenocarcinoma cells, pluripotent stem cells (iPS cells), and rat embryonic cortical neurons.

[0062] FIG. 19 depicts the results of an experiment in which in vitro transcribed RNA was complexed with DLinDHS and administered to rat by intradermal injection. Tissue at the injection site was fixed and mounted on slides, then stained with hematoxylin (blue) and rabbit anti-GFP antibody (brown). Two different magnifications of the same tissue are shown.

[0063] FIG. 20A depicts biopsied human skin imaged by fluorescent confocal microscopy, 48 hours after RNA encoding GFP, complexed with DLinDHS, was administered by intradermal injection.

[0064] FIG. 20B depicts the results of an experiment of in vivo mRNA delivery to a human subject by intradermal injection.

### DETAILED DESCRIPTION OF THE INVENTION

[0065] The present invention is based, in part, on the discovery of novel lipids that, inter alia, demonstrate superior abilities to support delivery of nucleic acids to cells, e.g. during transfection. The present invention provides such compositions, methods of making the compositions, and methods of using the compositions to introduce nucleic acids into cells, including for the treatment of diseases.

### Compounds and Synthetic Methods

[0066] In aspects, the present invention relates to a compound of Formula (I)

[chemical structure]

wherein: Q₁, Q₂, Q₃, and Q₄ are independently an atom or group capable of adopting a positive charge;
A₁ and A₂ are independently null, H, or optionally substituted C₁-C₆ alkyl;
L₁, L₂, and L₃ are independently null, a bond, (C₁-C₂₀)alkanediyl, (halo)(C₁-C₂₀)alkanediyl, (hydroxy)(C₁-C₂₀)alkanediyl, (alkoxy)(C₁-C₂₀)alkanediyl, arylene, heteroarylene, cycloalkanediyl, heterocycle-diyl, or any combination of the aforementioned optionally linked by one or more of an ether, an ester, an anhydride, an amide, a carbamate, a secondary amine, a tertiary amine, a quaternary ammonium, a thioether, a urea, a carbonyl, or an imine; R₁, R₂, R₃, R₄, R₅, R₆, R₇, and R₈ are independently null, H, (C₁-C₆₀)alkyl, (halo)(C₁-C₆₀)alkyl, (hydroxy)(C₁-C₆₀)alkyl, (alkoxy)(C₁-C₆₀)alkyl, (C₂-C₆₀)alkenyl, (halo)(C₂-C₆₀)alkenyl, (hydroxy)(C₂-C₆₀)alkenyl, (alkoxy)(C₂-C₆₀)alkenyl, (C₂-C₆₀)alkynyl, (halo)(C₂-C₆₀)alkynyl, (hydroxy)(C₂-C₆₀)alkynyl, (alkoxy)(C₂-C₆₀)alkynyl, wherein at least one of R₁, R₂, R₃, R₄, R₅, R₆, R₇, and R₈ comprises at least two unsaturated bonds; and x, y, and z are independently 0, 1, 2, 3, 4, 5, 6, 7, 8, 9, 10, 11, 12, 13, 14, or 15.

[0067] In embodiments, Q₁, Q₂, Q₃, and Q₄ independently are N, B, P, or Fe.

[0068] In embodiments, Q₁, Q₂, Q₃, and Q₄ are N.

[0069] In embodiments, Q₁, Q₂, Q₃, and Q₄ are independently a primary amine, a secondary amine, or a tertiary amine.

[0070] In embodiments, Q₁ and Q₄ are primary amines, and Q₂ and Q₃ are tertiary amines.

[0071] In embodiments, L₁, L₂, and L₃ are independently (C₁-C₆)alkanediyl or (hydroxy)(C₁-C₆)alkanediyl.

[0072] In embodiments, L₁ and L₃ are independently (hydroxy)(C₁-C₆)alkanediyl and L₂ is (C₁-C₆)alkanediyl.

[0073] In embodiments, L₁ and L₃ are 2-hydroxypropanediyl and L₂ is (C₁-C₆)alkanediyl.

[0074] In embodiments, L₁ and L₃ are 2-hydroxypropanediyl and L₂ is butanediyl.

[0075] In embodiments, one or more of R₁, R₂, R₃, R₄, R₅, R₆, R₇, and R₈ are independently selected from H, linoleyl, alpha-linolenyl, gamma-linolenyl, linoelaidyl, arachidonyl, eicosapentaenyl, and docosahexaenyl.

[0076] In embodiments, two or more of R₁, R₂, R₃, R₄, R₅, R₆, R₇, and R₈ are independently selected from H, linoleoyl, alpha-linolenoyl, gamma-linolenoyl, linoelaidoyl, arachidonoyl, eicosapentaenoyl, and docosahexaenoyl.

[0077] In embodiments, one or more of R₁, R₂, R₃, R₄, R₅, R₆, R₇, and R₈ are independently selected from H, myristoleyl, palmitoleyl, sapienyl, oleyl, elaidyl, vaccenyl, erucyl, caprylyl, capryl, lauryl, myristyl, palmityl, stearyl, arachidyl, behenyl, lignoceryl, and cerotyl.

[0078] In embodiments, two or more of R₁, R₂, R₃, R₄, R₅, R₆, R₇, and R₈ are independently selected from H, myristoleoyl, palmitoleoyl, sapienoyl, oleoyl, elaidoyl, vaccenoyl, erucoyl, capryloyl, caproyl, lauroyl, myristoyl, palmitoyl, stearoyl, arachidoyl, behenoyl, lignoceroyl, and cerotoyl.

[0079] In embodiments, R₁, R₂, R₃, R₅, R₇ and R₈ are H and R₄ and R₆ are independently selected from linoleyl, alpha-linolenyl, gamma-linolenyl, linoelaidyl, arachidonyl, eicosapentaenyl, and docosahexaenyl.

[0080] In embodiments, R₁, R₂, R₃, R₅, R₇ and R₈ are H and R₄ and R₆ are alpha-linolenyl.

[0081] In embodiments, R₁, R₂, R₃, R₅, R₇ and R₈ are H and R₄ and R₆ are linoleyl.

[0082] In embodiments, x and z are independently 0 or 1, and y is 1.

[0083] In embodiments, Q₁ and Q₄ are primary amines; Q₂ and Q₃ are tertiary amines; L₁ and L₃ are 2-hydroxypropanediyl; L₂ is butanediyl; R₁, R₂, R₃, R₅, R₇ and R₈ are H and R₄ and R₆ are linoleyl; and x, y, and z are 1.

[0084] In embodiments, one or more of L₁, L₂, and L₃ comprises at least one ester moiety.

[0085] In embodiments, one or more of R₂ and R₄ comprises at least one ester moiety.

[0086] In embodiments, A₁ and A₂ are H.

[0087] In aspects, the present invention relates to a compound of Formula (II)

[chemical structure]

wherein: R₉, R₁₀, R₁₁, R₁₂, R₁₃, R₁₄, R₁₅, R₁₆, R₁₇, R₁₈, R₁₉, R₂₀, R₂₁, R₂₂, R₂₃, R₂₄, R₂₅, R₂₆, R₂₇, and R₂₈ are independently H, halo, OH, (C₁-C₆)alkyl, (halo)(C₁-C₆)alkyl, (hydroxy)(C₁-C₆)alkyl, (alkoxy)(C₁-C₆)alkyl, aryl, heteroaryl, cycloalkyl, or heterocyclo;
j, k, m, s, and t are independently 0, 1, 2, 3, 4, 5, 6, 7, 8, 9, 10, 11, 12, 13, 14, or 15.

[0088] In embodiments, R₁₅, R₁₆, R₁₇, R₁₈, R₁₉, and R₂₀ are H; R₉, R₁₀, R₁₁, R₁₂, R₁₃ and R₁₄ are independently H or (C₁-C₆)alkyl; m is 8; i is 8; s is 1; j is 1; k is 4; and t is 4.

[0089] In embodiments, R₁₅, R₁₆, R₁₇, R₁₈, R₁₉, and R₂₀ are H; R₉, R₁₀, R₁₁, R₁₂, R₁₃ and R₁₄ are independently H or (C₁-C₆)alkyl; R₂₇ and R₂₈ are methyl; m is 8; i is 8; s is 1; j is 1; k is 4; and t is 4.

[0090] In embodiments, R₁₅, R₁₆, R₁₇, R₁₈, R₁₉, and R₂₀ are H; R₉, R₁₀, R₁₁, R₁₂, R₁₃ and R₁₄ are independently H; R₂₇ and R₂₈ are methyl; m is 8; i is 8; s is 1; j is 1; k is 4; and t is 4.

[0091] In embodiments, R₁₅, R₁₆, R₁₇, R₁₈, R₁₉, and R₂₀ are H; R₉, R₁₀, R₁₁, R₁₂, R₁₃ and R₁₄ are independently H; R₂₇ and R₂₈ are methyl; R₂₁, R₂₂, R₂₃, R₂₄, R₂₅, and R₂₆ are H; m is 8; i is 8; s is 1; j is 1; k is 4; and t is 4.

[0092] In embodiments, R₁₅, R₁₆, R₁₇, R₁₈, R₁₉, and R₂₀ are H; R₉, R₁₀, R₁₁, R₁₂, R₁₃ and R₁₄ are independently H; R₂₇ and R₂₈ are methyl; R₂₁, R₂₂, R₂₃, R₂₄, R₂₅, and R₂₆ are H; m is 9; i is 9; s is 1; j is 1; k is 4; and t is 4.

[0093] In embodiments, R₁₅, R₁₆, R₁₇, R₁₈, R₁₉, and R₂₀ are H; R₉, R₁₀, R₁₁, R₁₂, R₁₃ and R₁₄ are independently H; R₂₇ and R₂₈ are methyl; R₂₁, R₂₂, R₂₃, R₂₄, R₂₅, and R₂₆ are H; m is 9; i is 9; s is 1; j is 1; k is 3; and t is 3.

[0094] In aspects, the present invention relates to a compound of Formula (III):

[chemical structure]

wherein L₄, L₅, L₆, and L₇ are independently a bond, (C₁-C₂₀)alkanediyl, (halo)(C₁-C₂₀)alkanediyl, (hydroxy)(C₁-C₂₀)alkanediyl, (alkoxy)(C₁-C₂₀)alkanediyl, arylene, heteroarylene, cycloalkanediyl, heterocycle-diyl, —(CH₂)ᵥ₁—C(O)—, or —((CH₂)ᵥ₁—O)ᵥ₂—, or —((CH₂)ᵥ₁—C(O)—O)ᵥ₂—,
R₂₉, R₃₀, R₃₁, R₃₂, R₃₃, R₃₄, and R₃₅ are independently H, (C₁-C₆₀)alkyl, (halo)(C₁-C₆₀)alkyl, (hydroxy)(C₁-C₆₀)alkyl, (alkoxy)(C₁-C₆₀)alkyl, (C₂-C₆₀)alkenyl, (halo)(C₂-C₆₀)alkenyl, (hydroxy)(C₂-C₆₀)alkenyl, (alkoxy)(C₂-C₆₀)alkenyl, (C₂-C₆₀)alkynyl, (halo)(C₂-C₆₀)alkynyl, (hydroxy)(C₂-C₆₀)alkynyl, (alkoxy)(C₂-C₆₀)alkynyl, wherein at least one of R₂₉, R₃₀, R₃₁, R₃₂, R₃₃, R₃₄, and R₃₅ comprises at least two unsaturated bonds;
v, v₁ and v₂ are independently 0, 1, 2, 3, 4, 5, 6, 7, 8, 9, 10, 11, 12, 13, 14, or 15.

[0095] In embodiments, L₄, L₅, L₆, and L₇ are —(CH₂)₃—; R₂₉, R₃₀, R₃₁, R₃₂, R₃₃, R₃₄, and R₃₅ are independently H or (C₂-C₆₀)alkenyl; v is 1; wherein at least two of R₂₉, R₃₀, R₃₁, R₃₂, R₃₃, R₃₄, and R₃₅ comprise at least two unsaturated bonds.

[0096] In embodiments, L₄ and L₅ are —(CH₂)₃—; L₆ and L₇ are —(CH₂)₄—, R₂₉, R₃₀, R₃₁, R₃₂, R₃₃, R₃₄, and R₃₅ are independently H or (C₂-C₆₀)alkenyl; v is 1; wherein at least two of R₂₉, R₃₀, R₃₁, R₃₂, R₃₃, R₃₄, and R₃₅ comprise at least two unsaturated bonds.

[0097] In embodiments, L₄ and L₆ are —(CH₂)₃—; L₅ and L₇ are —(CH₂)₄—, R₂₉, R₃₀, R₃₁, R₃₂, R₃₃, R₃₄, and R₃₅ are independently H or (C₂-C₆₀)alkenyl; v is 1; wherein at least two of R₂₉, R₃₀, R₃₁, R₃₂, R₃₃, R₃₄, and R₃₅ comprise at least two unsaturated bonds.

[0098] In embodiments, L₄ and L₇ are —(CH₂)₃—; L₅ and L₆ are —(CH₂)₄—; R₂₉, R₃₀, R₃₁, R₃₂, R₃₃, R₃₄, and R₃₅ are independently H or (C₂-C₆₀)alkenyl; v is 1; wherein at least two of R₂₉, R₃₀, R₃₁, R₃₂, R₃₃, R₃₄, and R₃₅ comprise at least two unsaturated bonds.

[0099] In embodiments, L₄ and L₆ are —(CH₂)₃—; L₅ and L₇ are —(CH₂)₅—, R₂₉, R₃₀, R₃₁, R₃₂, R₃₃, R₃₄, and R₃₅ are independently H or (C₂-C₆₀)alkenyl; v is 1; wherein at least two of R₂₉, R₃₀, R₃₁, R₃₂, R₃₃, R₃₄, and R₃₅ comprise at least two unsaturated bonds.

[0100] In embodiments, L₄ and L₇ are (hydroxy)(C₁-C₂₀)alkanediyl; L₅ and L₆ are —(CH₂)₃—; R₂₉, R₃₀, R₃₁, R₃₂, R₃₃, R₃₄, and R₃₅ are independently H or (C₂-C₆₀)alkenyl; v is 1; wherein at least two of R₂₉, R₃₀, R₃₁, R₃₂, R₃₃, R₃₄, and R₃₅ comprise at least two unsaturated bonds.

[0101] In embodiments, L₄ and L₇ are (hydroxy)(C₁-C₂₀)alkanediyl; L₅ and L₆ are —(CH₂)₃—; R₂₉, R₃₀, R₃₁, R₃₂, R₃₃, R₃₄, and R₃₅ are independently H or (C₂-C₆₀)alkenyl; v is 1; wherein at least three of R₂₉, R₃₀, R₃₁, R₃₂, R₃₃, R₃₄, and R₃₅ comprise at least two unsaturated bonds.

[0102] In embodiments, L₄ and L₇ are (hydroxy)(C₁-C₂₀)alkanediyl; L₅ and L₆ are —(C₁-C₁₂)₄—; R₂₉, R₃₀, R₃₁, R₃₂, R₃₃, R₃₄, and R₃₅ are independently H or (C₂-C₆₀)alkenyl; v is 1; wherein at least three of R₂₉, R₃₀, R₃₁, R₃₂, R₃₃, R₃₄, and R₃₅ comprise at least two unsaturated bonds.

[0103] In embodiments, L₄ and L₇ are (hydroxy)(C₁-C₂₀)alkanediyl; L₅ and L₆ are —(CH₂)₅—, R₂₃, R₃₀, R₃₁, R₃₂, R₃₃, R₃₄, and R₃₅ are independently H or (C₂-C₆₀)alkenyl; v is 1; wherein at least three of R₂₃, R₃₀, R₃₁, R₃₂, R₃₃, R₃₄, and R₃₅ comprise at least two unsaturated bonds.

[0104] In embodiments, L₄ and L₇ are (hydroxy)(C₁-C₂₀)alkanediyl; L₅ and L₆ are —(CH₂)₆—, R₂₃, R₃₀, R₃₁, R₃₂, R₃₃, R₃₄, and R₃₅ are independently H or (C₂-C₆₀)alkenyl; v is 1; wherein at least three of R₂₃, R₃₀, R₃₁, R₃₂, R₃₃, R₃₄, and R₃₅ comprise at least two unsaturated bonds.

[0105] In embodiments, two or more of R₂₃, R₃₀, R₃₁, R₃₂, R₃₃, R₃₄, and R₃₅ are independently selected from H, myristoleoyl, palmitoleoyl, sapienoyl, oleoyl, elaidoyl, vaccenoyl, erucoyl, capryloyl, caproyl, lauroyl, myristoyl, palmitoyl, stearoyl, arachidoyl, behenoyl, lignoceroyl, and cerotoyl.

[0106] In embodiments, two or more of R₂₃, R₃₀, R₃₁, R₃₂, R₃₃, R₃₄, and R₃₅ are independently selected from H, linoleyl, alpha-linolenyl, gamma-linolenyl, linoelaidyl, arachidonyl, eicosapentaenyl, and docosahexaenyl.

[0107] In embodiments, L₄ and L₇ are 2-hydroxypropanediyl; L₂ is butanediyl; R₂₃, R₃₀, R₃₁, and R₃₂ are H, R₃₃, R₃₄, and R₃₅ are linoleyl; L₅ and L₆ are —(CH₂)₃—; and v is 1.

[0108] In embodiments, L₄ and L₇ are 2-hydroxypropanediyl; L₂ is butanediyl; R₂₃, R₃₀, R₃₁, and R₃₂ are H, R₃₃, R₃₄, and R₃₅ are linoleyl; L₅ and L₆ are —(CH₂)₄—; and v is 1.

[0109] In embodiments, L₄ and L₇ are 2-hydroxypropanediyl; L₂ is butanediyl; R₂₃, R₃₀, R₃₁, and R₃₂ are H, R₃₃, R₃₄, and R₃₅ are linoleyl; L₅ and L₆ are —(CH₂)₅—; and v is 1.

[0110] In embodiments, L₄ and L₇ are 2-hydroxypropanediyl; L₂ is butanediyl; R₂₃, R₃₀, R₃₁, and R₃₂ are H, R₃₃, R₃₄, and R₃₅ are linoleyl; L₅ and L₆ are —(CH₂)₆—; and v is 1.

[0111] In embodiments, the present invention relates to a compound of Formula (IV):

[chemical structure]

wherein n is 1, 2, 3, 4, 5, 6, 7, 8, 9, 10, 11, 12, 13, 14, or 15.

[0112] In embodiments, the present invention relates to a compound of Formula (V):

[chemical structure]

[0113] In embodiments, the present invention relates to a compound of Formula (VD:

[chemical structure]

[0114] In embodiments, the present invention relates to a compound of Formula (VII):

[chemical structure]

[0115] In embodiments, the present invention relates to a compound of Formula (VIM):

[chemical structure]

[0116] In embodiments, the present invention relates to a compound of Formula (IX):

[chemical structure]

[0117] In embodiments, the present invention relates to a compound of Formula (X):

[chemical structure]

[0118] In embodiments, the present invention relates to a compound of Formula (XI):

[chemical structure]

[0119] In embodiments, the present invention relates to a compound of Formula (XII):

[chemical structure]

[0120] In embodiments, the present invention relates to a compound of Formula (XIII):

[chemical structure]

[0121] In embodiments, the present invention relates to a compound of Formula (XIV):

[chemical structure]

[0122] In embodiments, the present invention relates to a compound of Formula (XV):

[chemical structure]

wherein n is 1, 2, 3, 4, 5, 6, 7, 8, 9, 10, 11, 12, 13, 14, or 15.

[0123] In embodiments, the present invention relates to a compound of Formula (XVI):

[chemical structure]

[0124] The present invention also relates to intermediates and synthetic methods for preparing the compound (e.g. of Formulae I-XVI) and compositions of the invention.

[0125] In embodiments, the compound (e.g. of Formulae I-XVI), and/or pharmaceutical composition and/or lipid aggregate and/or lipid carrier and/or lipid nucleic-acid complex and/or liposome and/or lipid nanoparticle comprising the compound (e.g. of Formulae I-XVI), is soluble in an alcohol (e.g. ethyl alcohol) at room temperature (e.g. about 20-25° C.) and/or at low temperatures (e.g. about 0° C., or about −10° C., or about −20° C., or about −30° C., or about −40° C., or about −50° C., or about −60° C., or about −70° C., or about −80° C.).

[0126] Certain synthetic methods, e.g. that are useful for preparation of a compound described herein (e.g. of Formulae I-XVI), have been discovered. Certain embodiments relate to a method for extracting an organic compound from a reaction containing lithium and/or aluminum compounds. Other embodiments relate to a method for extracting an organic compound from a reaction containing a reducing agent. In one embodiment, the reducing agent is a metal hydride. In another embodiment, the reducing agent is lithium aluminum hydride. In some embodiments, the reaction is quenched with water to yield a quenched reaction. In other embodiments one or more solvents are removed from the quenched reaction, e.g. by evaporation. In one embodiment, the quenched reaction is dried, e.g. with heat and/or under reduced pressure. In another embodiment, the dried, quenched reaction is extracted with a solvent. In some embodiments, the solvent is an alcohol. In one embodiment, the alcohol is isopropyl alcohol. In another embodiment the isopropyl alcohol is heated to about 80° C. In a further embodiment, the solvent containing the organic compound is decanted and/or filtered. In a still further embodiment, the solvent is removed, e.g. by evaporation, to yield the organic compound.

[0127] Methods for purifying the compounds of the present invention (e.g. of Formulae I-XVI) have also been discovered. Certain embodiments are therefore directed to a method for purifying a compound (e.g. of Formulae I-XVI). In one embodiment, a sample containing a compound (e.g. of Formulae I-XVI) and one or more impurities is suspended in a solvent. In one embodiment, the solvent is acetone. In another embodiment, the solvent is heated. In some embodiments, the compound is soluble in the solvent. In other embodiments at least one of the one or more impurities is insoluble in the solvent. In one embodiment, the one or more impurities comprise a phthalimide derivative. In one embodiment, the one or more impurities comprise phthalhydrazide. In a further embodiment, the sample is suspended in acetone, the compound dissolves, and at least one of the one or more impurities forms a precipitate. In a still further embodiment, the precipitate is removed by decanting, filtration, and/or centrifugation.

[0128] In yet another embodiment, the solvent is removed, e.g. by evaporation, to yield a purified compound.

[0129] In aspects, the present invention relates to a method for extracting an organic compound from a reaction containing lithium aluminum hydride and a solvent comprising: (a) quenching the reaction with water; (b) removing the solvent; (c) removing excess water; and (d) extracting the organic compound with an alcohol (optionally isopropyl alcohol); to yield an extracted organic compound.

[0130] In aspects, the present invention relates to a method for extracting an organic compound from a reaction containing a water-reactive compound and a first solvent comprising: (a) quenching the reaction with water; (b) removing the first solvent; (c) removing excess water; and (d) extracting the organic compound with a second solvent; to yield an extracted organic compound.

[0131] In aspects, the present invention relates to a method for purifying an organic compound from a mixture of the organic compound and a phthalimide or phthalimide derivative (optionally phthalhydrazide) comprising: (a) dissolving the mixture in acetone to form a precipitate; (b) removing the precipitate by centrifugation; and (c) removing the acetone; to yield a purified organic compound.

### Pharmaceutical Compositions, Lipid Aggregates, Lipid Carriers

[0132] In embodiments, the present invention relates to a pharmaceutical composition and/or a lipid aggregate and/or a lipid carrier and/or a lipid nucleic-acid complex and/or a liposome and/or a lipid nanoparticle which comprises a compound described herein (e.g. of Formulae I-XVI).

[0133] In embodiments, the pharmaceutical composition and/or lipid aggregate and/or lipid carrier and/or lipid nucleic-acid complex and/or liposome and/or lipid nanoparticle is in any physical form including, e.g., lipid nanoparticles, liposomes, micelles, interleaved bilayers, etc.

[0134] In embodiments, the pharmaceutical composition and/or a lipid aggregate and/or a lipid carrier is a liposome. In embodiments, the liposome is a large unilamellar vesicles (LUV), multilamellar vesicles (MLV) or small unilamellar vesicle (SUV). In embodiments, the liposome has a diameter up to about 50 to 80 nm. In embodiments, the liposome has a diameter of greater than about 80 to 1000 nm, or larger. In embodiments, the liposome has a diameter of about 50 to 1000 nm, e.g. about 200 nm or less. Size indicates the size (diameter) of the particles formed. Size may alternatively indicate the hydrodynamic radius of the particles formed. Size distribution may be determined using quasi-elastic light scattering (QELS) on a Nicomp Model 370 sub-micron particle sizer.

[0135] In certain embodiments, the present invention relates to methods and compositions for producing lipid-encapsulated nucleic acid particles in which nucleic acids are encapsulated within a lipid layer. Such nucleic acid-lipid particles, including, without limitation incorporating RNAs, are characterized using a variety of biophysical parameters including: drug to lipid ratio; encapsulation efficiency; particle size, and polydispersity index (PDI). High drug to lipid ratios, high encapsulation efficiency, good nuclease resistance and serum stability and controllable particle size, generally less than 200 nm in diameter are desirable (without limitation).

[0136] In certain embodiments, a particle size, which can affect transfection efficiency, depends on an ionic strength of a complexation medium. In other embodiments, particle size may depend on the ionic strength of a body fluid. In embodiments, the particle size depends on the pH of a complexation medium, or on the pH of a body fluid. In various embodiments, the particle size depends on the complexation time or temperature, or on the rate of mixing of components of a pharmaceutical composition and/or a lipid aggregate and/or a lipid carrier and/or a lipid nucleic-acid complex and/or a liposome and/or a lipid nanoparticle. In some embodiments, the particle size can be measured as a Z-average particle size, which reports the average size of a particle distribution. In some embodiments, a desirable size of the particles is from about 100 nm to about 200 nm, or from about 150 nm to about 200 nm, or from about 150 nm to about 175 nm, or from about 155 to about 165 nm.

[0137] Another physical attribute of the lipid nanoparticles in accordance with the present invention is a polydispersity index (PDI), which is an indication of their size distribution. The term “polydispersity” (or “dispersity”) is used to describe the degree of non-uniformity of a size distribution of particles. The PDI is dimensionless and it is scaled such that values smaller than 0.15 are considered monodisperse. Danaei et al., Pharmaceutics. 2018 May 18; 10(2):57. PDI values larger than 0.7 indicate that the sample has a very broad particle size distribution and may be suitable to be analyzed by the dynamic light scattering (DLS) technique. Id. PDI values of below 0.3 are deemed acceptable in drug delivery applications using lipid-based carriers, and the values below 0.2 are commonly deemed acceptable in practice for various polymer-based nanoparticles. Id.; see also Badran et al., Digest J. Nanomater. Biostruct. 2014, 9, 83-91; Chen et al., Int. J. Pharm. 2011, 408, 223-234; Putri et al., J. Pharm. Sci. Commun. 2017, 14, 79-85.

[0138] In some embodiments, a measure of a particle size (e.g., measured as a Z-average particle size (nm)) and a measure of a PDI represent suitability of the lipid nanoparticles for transfection. In embodiments, lipid carriers in accordance with the present invention have a size of less than 200 nm in diameter and a PDI of less than 0.2.

[0139] In some embodiments, lipid carriers in accordance with the present invention have a pH-dependent zeta potential. Zeta potential, measured in volts (V) or millivolts (mV), is determined for characterization of nanoparticles to estimate the surface charge, which can be used for understanding the physical stability of nanosuspensions. Zeta potential is a key indicator of the stability of colloidal dispersions. The zeta potential is the electric potential at the boundary of the double layer (DL) or the shear plane of a particle and has values that typically range from +100 to −100 mV. Values of zeta potential that are less than negative 20 mV or greater than positive 20 mV are typically desired for an electrostatically stabilized suspension. Zeta potential is affected by a pH of the medium. Other factors include ionic strength, concentration of additive(s), and temperature.

[0140] In some embodiments, a Zeta potential of a pharmaceutical composition comprising lipid particles is less than −20 mV at a pH of greater than 7.0, or less than −20 mV at a pH of greater than 7.1, or less than −20 mV at a pH of greater than 7.2, or less than −20 mV at a pH of greater than 7.3, or less than −20 mV at a pH of greater than 7.4, or less than −20 mV at a pH of greater than 7.5.

[0141] In embodiments, the compound, pharmaceutical composition, or lipid aggregate in accordance with the present disclosure has the Z-average particle size from about 50 nm to about 2000 nm, or from about 700 nm to about 1500 nm. In some embodiments, the Z-average particle size is about 750 nm. In some embodiments, the Z-average particle size is less than about 200 nm. In some embodiments, titrable particle size is desired, without limitation, to determine the ability of the compound, or pharmaceutical composition, or lipid aggregate, to permeate in vivo from the site of administration.

[0142] In some embodiments, properties of a medium in which a compound, pharmaceutical composition, or lipid aggregate in accordance with the present disclosure is formed are used to control the Z-average particle size.

[0143] In embodiments, the ionic strength of a medium in which a compound, pharmaceutical composition, or lipid aggregate in accordance with the present disclosure is formed is used to control the Z-average particle size.

[0144] In embodiments, the particle size is determined by control of the concentration of any one or more solutes (e.g., without limitation, sodium chloride, or calcium chloride, or potassium chloride, or sodium phosphate) in the medium of formation of the lipid aggregate. In embodiments, the lipid aggregate is formed in deionized water, with no solutes added, which may optionally be used to control the particle size.

[0145] In embodiments, the ionic strength of a medium in which a compound, pharmaceutical composition, or lipid aggregate in accordance with the present disclosure is formed, is used to maintain a particle size less than or equal to 200 nm.

[0146] In embodiments, a pH of a medium in which a compound, pharmaceutical composition, or lipid aggregate in accordance with the present disclosure is formed is used to control the Z-average particle size.

[0147] In embodiments, the compound, pharmaceutical composition, or lipid aggregate in accordance with the present disclosure comprises a stable dispersion of particles. In some embodiments, the stable dispersion has a pH from about 7.0 to about 8.0, or a pH of about 7.4.

[0148] In some embodiments, complexation of a nucleic acid (e.g., a small interfering RNA (siRNA), micro RNA (miRNA), messenger RNA (mRNA), long non-coding RNA (IncRNA), plasmid DNA, etc.) with a lipid nanoparticle confers nuclease resistance. In some embodiments, the nuclease is an RNase, optionally RNase A. In some embodiments, the RNase is naturally occurring in vivo.

[0149] Nucleic acid to lipid ratio is the amount of nucleic acid in a defined volume of preparation divided by the amount of lipid in the same volume. This may be on a mole per mole basis, or on a weight per weight basis, or on a weight per mole basis, or on a mole per weight basis. For final, administration-ready formulations, the nucleic acid:lipid ratio may optionally be calculated after dialysis, chromatography and/or enzyme (e.g., nuclease) digestion has been employed to remove as much external nucleic acid as possible.

[0150] Encapsulation efficiency refers to the drug (including nucleic acid) to lipid ratio of the starting mixture divided by the drug (including nucleic acid) to lipid ratio of the final, administration competent formulation. This is a measure of relative efficiency. For a measure of absolute efficiency, the total amount of nucleic acid added to the starting mixture that ends up in the administration competent formulation, can also be calculated. The amount of lipid lost during the formulation process may also be calculated. Efficiency is a measure of the wastage and expense of the formulation.

### Transfection

[0151] In embodiments, the present compounds (e.g. of Formulae I-XVI) and/or pharmaceutical compositions and/or lipid aggregates and/or lipid carriers have utility in lipid aggregates for delivery of macromolecules and other compounds into cells. In embodiments, the present compounds (e.g. of Formulae I-XVI) and/or pharmaceutical compositions and/or lipid aggregates and/or lipid carriers have utility for delivery of nucleic acids into cells.

[0152] In embodiments, there is provided a method for transfecting a cell with a nucleic acid, comprising contacting the cell with a complex of the nucleic acid and a present compound (e.g. of Formulae I-XVI) and/or pharmaceutical composition and/or lipid aggregate and/or lipid carrier. In embodiments, the complex of the nucleic acid and the present compound (e.g. of Formulae I-XVI) and/or pharmaceutical composition and/or lipid aggregate and/or lipid carrier is formed prior to contact with the cell.

[0153] In embodiments, the present compounds (e.g. of Formulae I-XVI) and/or pharmaceutical compositions and/or lipid aggregates and/or lipid carriers encapsulate nucleic acids with high-efficiency, and/or have high drug:lipid ratios, and/or protect the encapsulated nucleic acid from degradation and/or clearance in serum, and/or are suitable for systemic delivery, and/or provide intracellular delivery of the encapsulated nucleic acid. In addition, the present compounds (e.g. of Formulae I-XVI) and/or pharmaceutical compositions and/or lipid aggregates and/or lipid carriers are well-tolerated and provide an adequate therapeutic index, such that patient treatment at an effective dose of the nucleic acid is not associated with significant toxicity and/or risk to the patient.

[0154] In embodiments, the present compounds (e.g. of Formulae I-XVI) and/or pharmaceutical compositions and/or lipid aggregates and/or lipid carriers are polycationic. In embodiments, the present compounds (e.g. of Formulae I-XVI) and/or pharmaceutical compositions and/or lipid aggregates and/or lipid carriers form stable complexes with various anionic macromolecules, such as polyanions, such as nucleic acids, such as RNA or DNA. These compounds (e.g. of Formulae I-XVI) and/or pharmaceutical compositions and/or lipid aggregates and/or lipid carriers, in various embodiments, have the property, when dispersed in water, of forming lipid aggregates which strongly, via their cationic portion, with polyanions. By using an excess of cationic charges relative to the anionic compound, the polyanion-lipid complexes may be adsorbed on cell membranes, thereby facilitating uptake of the desired compound by the cells.

[0155] In embodiments, the present compounds (e.g. of Formulae I-XVI) and/or pharmaceutical compositions and/or lipid aggregates and/or lipid carriers and/or lipid nucleic-acid complexes and/or liposomes and/or lipid nanoparticles mediate one or more of (i) compacting a nucleic acid payload to be delivered, without wishing to be bound by theory, protecting it from nuclease degradation and enhancing receptor-mediated uptake, (ii) improving association with negatively-charged cellular membranes, without wishing to be bound by theory, by giving the complexes a positive charge, (iii) promoting fusion with endosomal membranes, without wishing to be bound by theory, facilitating the release of complexes from endosomal compartments, and (iv) enhancing transport from the cytoplasm to the nucleus.

[0156] In embodiments, the present invention relates to the present compounds (e.g. of Formulae I-XVI) and/or pharmaceutical compositions and/or lipid aggregates and/or lipid carriers for transfection, or methods of transfection, which have a high transfection efficiency. In embodiments, the transfection efficiency is measured by assaying a percentage of cells that are transfected compared to the entire population, during a transfection protocol. In various embodiments, the transfection efficiency of the present compositions and methods is greater than about 30%, or greater than about 40%, or greater than about 50%, or greater than about 60%, or greater than about 70%, or greater than about 80%, or greater than about 90%, or greater than about 95%. In various embodiments, the transfection efficiency of the present compositions and methods is greater than the transfection efficiency of commercially available products (e.g. LIPOFECTIN, LIPOFECTAMINE, LIPOFECTAMINE 2000, LIPOFECTAMINE 3000 (Life Technologies)). In various embodiments, the transfection efficiency of the present compositions and methods is about 5-fold, or 10-fold, or 15-fold, or 20-fold, or 30-fold greater than the transfection efficiency of commercially available products (e.g. LIPOFECTIN, LIPOFECTAMINE, LIPOFECTAMINE 2000, LIPOFECTAMINE 3000 Life Technologies).

[0157] In embodiments, the present invention relates to the present compounds (e.g. of Formulae I-XVI) and/or pharmaceutical compositions and/or lipid aggregates and/or lipid carriers for transfection, or methods of transfection, which permit a high level of endosomal escape. In various embodiments, the endosomal escape of the present compositions and methods is greater than the endosomal escape of commercially available products (e.g. LIPOFECTIN, LIPOFECTAMINE, LIPOFECTAMINE 2000, LIPOFECTAMINE 3000 Life Technologies). In various embodiments, the endosomal escape of the present compositions and methods is about 5-fold, or 10-fold, or 15-fold, or 20-fold, or 30-fold greater than the endosomal escape of commercially available products (e.g. LIPOFECTIN, LIPOFECTAMINE, LIPOFECTAMINE 2000, LIPOFECTAMINE 3000 (Life Technologies)).

[0158] In embodiments, the present compounds (e.g. of Formulae I-XVI) and/or pharmaceutical compositions and/or lipid aggregates and/or lipid carriers are serum-resistant. In embodiments, the present compounds (e.g. of Formulae I-XVI) and/or pharmaceutical compositions and/or lipid aggregates and/or lipid carriers are substantially stable in serum. In embodiments, the present compounds (e.g. of Formulae I-XVI) and/or pharmaceutical compositions and/or lipid aggregates and/or lipid carriers are serum-resistant. In embodiments, the present transfection methods can function in the presence of serum and/or do not require serum inactivation and/or media changes. In embodiments, the stability in serum and/or serum-resistant is measurable via in vitro assays. Transfection efficiency in varying amounts of serum may be used to assess the ability to transfect a macromolecule (e.g., without limitation, DNA or RNA), optionally in comparison to commercially available products (e.g. LIPOFECTIN, LIPOFECTAMINE, LIPOFECTAMINE 2000, LIPOFECTAMINE 3000 (Life Technologies)).

[0159] In embodiments, the present invention relates to present compounds (e.g. of Formulae I-XVI) and/or pharmaceutical compositions and/or lipid aggregates and/or lipid carriers for transfection, or methods of transfection have low or reduced toxicity effects. In embodiments, the present invention relates present compounds (e.g. of Formulae I-XVI) and/or pharmaceutical compositions and/or lipid aggregates and/or lipid carriers for transfection, or methods of transfection have reduced toxicity effects as compared to commercially available products (e.g. LIPOFECTIN, LIPOFECTAMINE, LIPOFECTAMINE 2000, LIPOFECTAMINE 3000 Life Technologies). In various embodiments, the present compositions and methods allow for cells having greater than about 50%, or about 60%, or about 70%, or about 80%, or about 90%, or about 95% viability after transfection. In various embodiments, the present compositions and methods allow for cells having 5-fold, or 10-fold, or 15-fold, or 20-fold, or 30-fold greater viability after transfection, as compared to commercially available products (e.g. LIPOFECTIN, LIPOFECTAMINE, LIPOFECTAMINE 2000, LIPOFECTAMINE 3000 (Life Technologies)). In embodiments, toxicity effects include disruption in cell morphology and/or viability or deregulation of one or more genes.

[0160] In embodiments, the present invention relates to the present compounds (e.g. of Formulae I-XVI) and/or pharmaceutical compositions and/or lipid aggregates and/or lipid carriers for transfection, or methods of transfection, which permit a high level of protein expression from the nucleic acid (e.g. DNA or RNA) being transfected. In various embodiments, the protein expression of the present compositions and methods is greater than about 30%, or greater than about 40%, or greater than about 50%, or greater than about 60%, or greater than about 70%, or greater than about 80%, or greater than about 90%, or greater than about 95% than untransfected. In various embodiments, the resultant protein expression of the present compositions and methods is greater than the resultant protein expression of commercially available products (e.g. LIPOFECTIN, LIPOFECTAMINE, LIPOFECTAMINE 2000, LIPOFECTAMINE 3000 (Life Technologies)). In various embodiments, the resultant protein expression of the present compositions and methods is about 5-fold, or 10-fold, or 15-fold, or 20-fold, or 30-fold greater than the resultant protein expression of commercially available products (e.g. LIPOFECTIN, LIPOFECTAMINE, LIPOFECTAMINE 2000, LIPOFECTAMINE 3000 (Life Technologies)).

[0161] In embodiments, the present invention relates to the present compounds (e.g. of Formulae I-XVI) and/or pharmaceutical compositions and/or lipid aggregates and/or lipid carriers for transfection, or methods of transfection, which allow for transfection, including efficient transfection as described herein, in various cell types.

[0162] In embodiments, the present invention relates to the present compounds (e.g. of Formulae I-XVI) and/or pharmaceutical compositions and/or lipid aggregates and/or lipid carriers for transfection, or methods of transfection, which allow for transfection, including efficient transfection as described herein, in established cell lines, hard-to-transfect cells, primary cells, stem cells, and blood cells. In embodiments, the cell type is a keratinocyte, fibroblast, or PBMC.

[0163] In embodiments, present compounds (e.g. of Formulae I-XVI), pharmaceutical composition and/or a lipid aggregate and/or a lipid carrier is suitable for transfection or delivery of compounds to target cells, either in vitro or in vivo.

[0164] In embodiments, the present invention relates to present compounds (e.g. of Formulae I-XVI) and/or pharmaceutical compositions and/or lipid aggregates and/or lipid carriers for transfection, or methods of transfection that do not require additional reagents for transfection, e.g. the LipofectAMINE PLUS Reagent (Life Technologies).

[0165] In embodiments, the present compounds are components of a pharmaceutical composition and/or a lipid aggregate and/or a lipid carrier which does not require an additional or helper lipid, e.g. for efficient transfection. For instance, in embodiments, the pharmaceutical composition and/or a lipid aggregate and/or a lipid carrier which does not require one or more of DOPE, DOPC, cholesterol, and a polyethylene glycol (PEG)-modified lipid (inclusive, without limitation, or a PEGylation of DOPE, DOPC, and/or cholesterol), e.g. for efficient transfection.

[0166] In embodiments, the present compounds are components of a pharmaceutical composition and/or a lipid aggregate and/or a lipid carrier that further comprise an additional or helper lipid.

[0167] In embodiments, the additional or helper lipid is selected from one or more of the following categories: cationic lipids; anionic lipids; neutral lipids; multi-valent charged lipids; and zwitterionic lipids. In some cases, a cationic lipid may be used to facilitate a charge-charge interaction with nucleic acids.

[0168] In embodiments, the additional or helper lipid is a neutral lipid. In embodiments, the neutral lipid is dioleoylphosphatidylethanolamine (DOPE), 1,2-Dioleoyl-sn-glycero-3-phosphocholine (DOPC), or cholesterol. In embodiments, cholesterol is derived from plant sources. In other embodiments, cholesterol is derived from animal, fungal, bacterial or archaeal sources.

[0169] In embodiments, the additional or helper lipid is a further cationic lipid. In embodiments, the cationic lipid is N-[1-(2,3-dioleoyloxy)propyl]-N,N,N-trimethylammonium chloride (DOTMA), 1,2-bis(oleoyloxy)-3-3-(trimethylammonia) propane (DOTAP), or 1,2-dioleoyl-3-dimethylammonium-propane (DODAP).

[0170] In embodiments, the phospholipids 18:0 PC, 18:1 PC, 18:2 PC, 18:2 PE, DSPE, DOPE, 18:2 PE, DMPE or a combination thereof are used as helper lipids. In embodiments, the additional or helper lipid is DOTMA and DOPE, optionally in a ratio of about 1:1. In embodiments, the additional or helper lipid is DHDOS and DOPE, optionally in a ratio of about 1:1.

[0171] In embodiments, the additional or helper lipid is a commercially available product (e.g. LIPOFECTIN, LIPOFECTAMINE, LIPOFECTAMINE 2000, LIPOFECTAMINE 3000 Life Technologies).

[0172] In embodiments, the additional or helper lipid is a compound having the Formula (A):

[chemical structure]

[0173] Where, R₁ and R₄ are straight-chain alkenyl having 17 carbon atoms; R₂ and R₅ are —(CH2)p-NH2 where p is 1-4; I is 1-10; and Xa is a physiologically acceptable anion.

[0174] In embodiments, the additional or helper lipid is a PEGylated lipid. In embodiments, the PEGylated lipid has a PEG molecule covalently attached to it, where the PEG has an average molecular weight of from about 10 kDa to about 400 kDa. In embodiments, the polyethylene glycols, which are suitable for use in the present invention are those having an average molecular weight of at least 10,000 daltons to 40,000 daltons. In embodiments, the PEGs have an average molecular weight of 20,000 daltons, such as an average molecular weight of in the range of 20,000 to 700,000 daltons, for example in the range of 20,000 to 600,000 daltons, such as in the range of 35,000 to 500,000 daltons, for example in the range of 35,000 to 400,000 daltons, such as in the range of 35,000 to 350,000 daltons, for example in the range of 50,000 to 350,000 daltons, such as in the range of 100,000 to 300,000 daltons, for example in the range of 150,000 to 350,000 daltons, such as in the range of 200,000 to 300,000 daltons. In certain embodiments, polyethylene glycols suitable for use with the compositions and methods described herein are those having an average molecular weight selected from approximately 10,000 daltons, approximately 15,000 daltons, approximately 20,000 daltons, approximately 25,000 daltons, approximately 30,000 daltons, approximately 35,000 daltons, approximately 50,000 daltons, approximately 75,000 daltons, approximately 100,000 daltons, approximately 150,000 daltons, approximately 200,000 daltons, approximately 250,000 daltons, approximately 300,000 daltons, approximately 400,000 daltons, 150,000 daltons, 200,000 daltons, 250,000 daltons, 300,000 daltons, 400,000 daltons. In the present context, referring to the average molecular weight of polyethylene glycols, “approximately” means+/−30%. In embodiments, PEG, that is attached covalently to the with the compositions and methods described herein, has an average molecular weight of 10 kDa, 20 kDa, or 40 kDa. In embodiments, the PEG, is a branched PEG, a star PEG, or a comb PEG.

[0175] In one embodiment, the present compounds (e.g. of Formulae I-XVI) and/or pharmaceutical compositions and/or lipid aggregates and/or lipid carriers include one or more polyethylene glycol (PEG) chains, optionally selected from PEG200, PEG300, PEG400, PEG600, PEG800, PEG1000, PEG1500, PEG2000, PEG3000, and PEG4000.

[0176] In embodiments, the PEG is PEG2000. In embodiments, the present compounds (e.g. of Formulae I-XVI) and/or pharmaceutical compositions and/or lipid aggregates and/or lipid carriers include 1,2-distearoyl-sn-glycero-3-phosphoethanolamine (DSPE) or a derivative thereof. In one embodiment, the present compounds (e.g. of Formulae I-XVI) and/or pharmaceutical compositions and/or lipid aggregates and/or lipid carriers comprise PEGylated lipid 1,2-distearoyl-sn-glycero-3-phosphoethanolamine-N-[methoxy(polyethylene glycol)-2000] (DSPE-PEG); in another embodiment, the present compounds (e.g. of Formulae I-XVI) and/or pharmaceutical compositions and/or lipid aggregates and/or lipid carriers comprise 1,2-dimyristoyl-sn-glycero-3-phosphoethanolamine-N-[methoxy(polyethylene glycol)-2000] (DMPE-PEG); in yet another embodiment, the present compounds (e.g. of Formulae I-XVI) and/or pharmaceutical compositions and/or lipid aggregates and/or lipid carriers comprise 1,2-dimyristoyl-rac-glycero-3-methoxypolyethylene glycol-2000 (DMG-PEG). In further embodiments, the present compounds (e.g. of Formulae I-XVI) and/or pharmaceutical compositions and/or lipid aggregates and/or lipid carriers comprise a mixture of PEGylated lipids or free PEG chains.

[0177] In embodiments, the present compounds (e.g. of Formulae I-XVI) and/or pharmaceutical compositions and/or lipid aggregates and/or lipid carriers comprise one or more of N-(carbonyl-ethoxypolyethylene glycol 2000)-1,2-distearoyl-sn-glycero-3-phosphoethanolamine (MPEG2000-DSPE), fully hydrogenated phosphatidylcholine, cholesterol, LIPOFECTAMINE 3000, a cationic lipid, a polycationic lipid, and 1,2-distearoyl-sn-glycero-3-phosphoethanolamine-N-[folate(polyethylene glycol)-5000] (FA-MPEG5000-DSPE).

[0178] In some embodiments, one or more PEGylated helper lipids are incorporated into pharmaceutical compositions and/or lipid aggregates and/or lipid carriers and/or liposomes and/or lipid nanoparticles comprising the present compounds (e.g. of Formulae I-XVI). In some embodiments, the concentration of PEGylated helper lipid, or the ratio of PEGylated helper lipid to any one or more of the present compounds (e.g., of Formulae I-XVI), or the ratio of PEGylated helper lipid to nucleic acid is used to affect particle size. In some embodiments, particle size is determined by other factors (e.g., without limitation, ionic strength of the solution containing the particles, addition of salts to a solution containing the particles, addition of other small molecules to a solution containing the particles, adjustment of the pH of a solution containing the particles). In some embodiments, particle size control by other factors is used in conjunction with one or more PEGylated helper lipids, or in place of one or more PEGylated helper lipids.

[0179] In one embodiment, the present compounds (e.g. of Formulae I-XVI) and/or pharmaceutical compositions and/or lipid aggregates and/or lipid carriers comprise about 3.2 mg/mL N-(carbonyl-ethoxypolyethylene glycol 2000)-1,2-distearoyl-sn-glycero-3-phosphoethanolamine (MPEG2000-DSPE), about 9.6 mg/mL fully hydrogenated phosphatidylcholine, about 3.2 mg/mL cholesterol, about 2 mg/mL ammonium sulfate, and histidine as a buffer, with about 0.27 mg/mL 1,2-distearoyl-sn-glycero-3-phosphoethanolamine-N-[folate(polyethylene glycol)-5000] (FA-MPEG5000-DSPE) added to the lipid mixture. In another embodiment, the nucleic acids are complexed by combining 1 μL of LIPOFECTAMINE 3000 per about 1 μg of nucleic acid and incubating at room temperature for at least about 5 minutes. In one embodiment, the LIPOFECTAMINE 3000 is a solution comprising a lipid at a concentration of about 1 mg/mL. In embodiments, nucleic acids are encapsulated by combining about 10 μg of the present compounds (e.g. of Formulae I-XVI) and/or pharmaceutical compositions and/or lipid aggregates and/or lipid carriers per about 1 μg of nucleic acid and incubating at room temperature for about 5 minutes.

[0180] In embodiments, the present compounds (e.g. of Formulae I-XVI) and/or pharmaceutical compositions and/or lipid aggregates and/or lipid carriers comprise one or more nanoparticles. In one embodiment, the nanoparticle is a polymeric nanoparticle. In various embodiments, the present compounds (e.g. of Formulae I-XVI) and/or pharmaceutical compositions and/or lipid aggregates and/or lipid carriers comprise one or more of a diblock copolymer, a triblock copolymer, a tetrablock copolymer, and a multiblock copolymer. In various embodiments, the present compounds (e.g. of Formulae I-XVI) and/or pharmaceutical compositions and/or lipid aggregates and/or lipid carriers comprise one or more of polymeric nanoparticles comprising a polyethylene glycol (PEG)-modified polylactic acid (PLA) diblock copolymer (PLA-PEG), PEG-polypropylene glycol-PEG-modified PLA-tetrablock copolymer (PLA-PEG-PPG-PEG), and Poly(lactic-co-glycolic acid) copolymer. In another embodiment, the present compounds (e.g. of Formulae I-XVI) and/or pharmaceutical compositions and/or lipid aggregates and/or lipid carriers comprise a statistical, or an alternating, or a periodic copolymer, or any other sort of polymer.

[0181] In embodiments, the present compounds (e.g. of Formulae I-XVI) and/or pharmaceutical compositions and/or lipid aggregates and/or lipid carriers comprise one or more lipids that are described in WO/2000/027795, the entire contents of which are hereby incorporated by reference.

[0182] In embodiments, the present compounds (e.g. of Formulae I-XVI) and/or pharmaceutical compositions and/or lipid aggregates and/or lipid carriers comprises Polybrene™ (hexadimethrine bromide) as described in U.S. Pat. No. 5,627,159, the entire contents of which is incorporated herein by reference.

[0183] In various embodiments, the present compounds (e.g. of Formulae I-XVI) and/or pharmaceutical compositions and/or lipid aggregates and/or lipid carriers comprise one or more polymers. Examples of polymer include hexadimethrine bromide (Polybrene™), DEAE-Dextran, protamine, protamine sulfate, poly-L-lysine, or poly-D-lysine. These polymers may be used in combination with cationic lipids to result in synergistic effects on uptake by cells, stability of the present compounds (e.g. of Formulae I-XVI) and/or pharmaceutical compositions and/or lipid aggregates and/or lipid carriers, including serum stability (e.g., stability in vivo), endosomal escape, cell viability, and protein expression.

[0184] In embodiments, the present compounds are components of a pharmaceutical composition and/or a lipid aggregate and/or a lipid carrier that further comprise one or more additional lipids or polymers selected from Table 1. In other embodiments, the nucleic acids of the present invention are components of a pharmaceutical composition and/or a lipid aggregate and/or a lipid carrier that further comprise one or more lipids or polymers selected from Table 1.

[0185] In various embodiments, one or more, or two or more, or three or more, or four or more, or five or more of the lipids of Table 1 are combined in a formulation with the present compounds and are components of a pharmaceutical composition and/or a lipid aggregate and/or a lipid carrier.

TABLE 1
Illustrative Biocompatible Lipids and Polymers

3β-[N-(N′,N′-dimethylaminoethane)-carbamoyl]cholesterol
(DC-Cholesterol)
1,2-dioleoyl-3-trimethylammonium-propane (DOTAP/18:1 TAP)
N-(4-carboxybenzyl)-N,N-dimethyl-2,3-bis(oleoyloxy)propan-1-
aminium (DOBAQ)
1,2-dimyristoyl-3-trimethylammonium-propane (14:0 TAP)
1,2-dipalmitoyl-3-trimethylammonium-propane (16:0 TAP)
1,2-stearoyl-3-trimethylammonium-propane (18:0 TAP)
1,2-dioleoyl-3-dimethylammonium-propane (DODAP/18:1 DAP)
1,2-dimyristoyl-3-dimethylammonium-propane (14:0 DAP)
1,2-dipalmitoyl-3-dimethylammonium-propane (16:0 DAP)
1,2-distearoyl-3-dimethylammonium-propane (18:0 DAP)
dimethyldioctadecylammonium (18:0 DDAB)
1,2-dilauroyl-sn-glycero-3-ethylphosphocholine (12:0 EthylPC)
1,2-dimyristoyl-sn-glycero-3-ethylphosphocholine (14:0 EthylPC)
1,2-dimyristoleoyl-sn-glycero-3-ethylphosphocholine (14:1 EthylPC)
1,2-dipalmitoyl-sn-glycero-3-ethylphosphocholine (16:0 EthylPC)
1,2-distearoyl-sn-glycero-3-ethylphosphocholine (18:0 EthylPC)
1,2-dioleoyl-sn-glycero-3-ethylphosphocholine (18:1 EthylPC)
1-palmitoyl-2-oleoyl-sn-glycero-3-ethylphosphocholine (16:1-18:1
EthylPC)
1,2-di-O-octadecenyl-3-trimethylammonium propane (DOTMA)
N1-[2-((1S)-1-[(3-aminopropyl)amino]-4-[di(3-amino-propyl)amino]
butylcarboxamido)ethyl]-3,4-di[oleyloxy]-benzamide (MVL5)
2,3-dioleyloxy-N-[2-spermine carboxamide]ethyl-N,N-dimethyl-1-
propanammonium trifluoroacetate (DOSPA)
1,3-di-oleoyloxy-2-(6-carboxy-spermyl)-propylamid (DOSPER)
N-[1-(2,3-dimyristyloxy)propyl]-N,N-dimethyl-N-(2-hydroxyethyl)
ammonium bromide (DMRIE)
LIPOFECTAMINE, LIPOFECTAMINE 2000, LIPOFECTAMINE
RNAiMAX, LIPOFECTAMINE 3000, LIPOFECTAMINE
MessengerMAX, TransIT mRNA
dioctadecyl amidoglyceryl spermine (DOGS)
dioleoyl phosphatidyl ethanolamine (DOPE)
1,2-dilinoleyloxy-3-dimethylaminopropane (DLinDMA)
1,2-dilinoleyl-4-(2-dimethylaminoethyl)-[1,3]-dioxolane (DLin-KC2-
DMA)
Heptatriaconta-6,9,28,31-tetraen-19-yl 4-(dimethylamino)butanoate
(DLin-MC3-DMA)
N1,N4-dimyristyl-N1,N4-di-(2-hydroxy-3-aminopropyl)-diaminobutane
(DHDMS)
N1,N4-dioleyl-N1,N4-di-(2-hydroxy-3-aminopropyl)-diaminobutane
(DHDOS)
1,2-distearoyl-sn-glycero-3-phosphocholine (18:0 PC DSPC)
1,2-dioleyl-sn-glycero-3-phosphocholine (18:1 PC)
1,2-distearyl-sn-glycero-3-phosphatidyl ethanolamine (DSPE)
1,2-dilinoleyl-3-dimethylammonium-propane (18:2 DAP)
hexadimethrine bromide (Polybrene ™)
DEAE-Dextran
protamine
protamine sulfate
poly-L-lysine
poly-D-lysine
Poly(beta-amino-ester) polymer
polyethyleneimine
block co-polymer comprising one or more of: PEG, PLGA, PPG, PEI,
PLL, PCL,
a PLURONIC

[0186] Additional components that may be present in a pharmaceutical composition and/or a lipid aggregate and/or a lipid carrier and/or a lipid nucleic-acid complex and/or a liposome and/or a lipid nanoparticle of the present invention include bilayer stabilizing components such as polyamide oligomers (see, e.g., U.S. Pat. No. 6,320,017), peptides, proteins, detergents, lipid-derivatives, such as PEG coupled to phosphatidylethanolamine and PEG conjugated to ceramides (see, U.S. Pat. No. 5,885,613).

[0187] In embodiments, the present lipids include a further cationic lipid, a neutral lipid, a sterol, and a lipid selected to reduce aggregation of lipid particles during formation, which may result from steric stabilization of particles which prevents charge-induced aggregation during formation. Examples of lipids that reduce aggregation of particles during formation include polyethylene glycol (PEG)-modified lipids, monosialoganglioside Gm1, and polyamide oligomers (“PAO”) such as (described in U.S. Pat. No. 6,320,017). Other compounds with uncharged, hydrophilic, steric-barrier moieties, which prevent aggregation during formulation, like PEG, Gm1 or ATTA, can also be coupled to lipids for use as in the methods and compositions of the invention. ATTA-lipids are described, e.g., in U.S. Pat. No. 6,320,017, and PEG-lipid conjugates are described, e.g., in U.S. Pat. Nos. 5,820,873, 5,534,499 and 5,885,613. Typically, the concentration of the lipid component selected to reduce aggregation is about 0.1 to 15% (by mole percent of lipids). If the particles are stable after formulation, the PEG or ATTA can be dialyzed away before administration to a subject.

[0188] In embodiments, it is desirable to target the present compounds (e.g. of Formulae I-XVI) and/or pharmaceutical compositions and/or lipid aggregates and/or lipid carriers using targeting moieties that are specific to a cell type or tissue. Targeting of lipid particles using a variety of targeting moieties, such as ligands, cell surface receptors, glycoproteins, vitamins (e.g., riboflavin) and monoclonal antibodies, has been previously described (see, e.g., U.S. Pat. Nos. 4,957,773 and 4,603,044). The targeting moieties can comprise the entire protein or fragments thereof.

[0189] Targeting mechanisms generally require that the targeting agents be positioned on the surface of the lipid particle in such a manner that the target moiety is available for interaction with the target, for example, a cell surface receptor. A variety of different targeting agents and methods are known and available in the art, including those described, e.g., in Sapra and Allen, Prog. Lipid Res. 42(5):439-62 (2003); and Abra et al., J. Liposome Res. 12:1-3, (2002). Standard methods for coupling the target agents can be used. For example, phosphatidylethanolamine, which can be activated for attachment of target agents, or derivatized lipophilic compounds, such as lipid-derivatized bleomycin, can be used. Antibody-targeted liposomes can be constructed using, for instance, liposomes that incorporate protein A (see, Renneisen, et al., J. Bio. Chem., 265:16337-16342 (1990) and Leonetti, et al., Proc. Natl. Acad. Sci. (USA), 87:2448-2451 (1990). Other examples of antibody conjugation are disclosed in U.S. Pat. No. 6,027,726, the teachings of which are incorporated herein by reference. Examples of targeting moieties can also include other proteins, specific to cellular components, including antigens associated with neoplasms or tumors. Proteins used as targeting moieties can be attached to the liposomes via covalent bonds (see, Heath, Covalent Attachment of Proteins to Liposomes, 149 Methods in Enzymology 111-119 (Academic Press, Inc. 1987)). Other targeting methods include the biotin-avidin system.

[0190] In embodiments, the present compositions and methods employ a complexation medium. In an embodiment, the complexation medium has a pH greater than about 7, or greater than about 7.2, or greater than about 7.4, or greater than about 7.6, or greater than about 7.8, or greater than about 8.0, or greater than about 8.2, or greater than about 8.4, or greater than about 8.6, or greater than about 8.8, or greater than about 9.0. In an embodiment, the complexation medium comprises transferrin. In a further embodiment, the complexation medium comprises DMEM. In a still further embodiment, the complexation medium comprises DMEM/F12.

### Nucleic Acids

[0191] In embodiments, the present compounds (e.g. of Formulae I-XVI) and/or pharmaceutical compositions and/or lipid aggregates and/or lipid carriers are suitable for associating with a nucleic acid, inclusive of, for instance, include any oligonucleotide or polynucleotide.

[0192] In embodiments, the nucleic acid is an RNA, a small interfering RNA (siRNA), micro RNA (miRNA), messenger RNA (mRNA), long non-coding RNA (IncRNA), antisense oligonucleotide, ribozyme, plasmid, immune stimulating nucleic acid, antisense, antagomir, antimir, microRNA mimic, supermir, U1 adaptor, or aptamer.

[0193] In embodiments, nucleic acids are fully encapsulated within the present compounds (e.g. of Formulae I-XVI) and/or pharmaceutical compositions and/or lipid aggregates and/or lipid carriers. In other embodiments, nucleic acids are partially encapsulated within the present compounds (e.g. of Formulae I-XVI) and/or pharmaceutical compositions and/or lipid aggregates and/or lipid carriers. In still other embodiments, nucleic acids and the present compounds (e.g. of Formulae I-XVI) and/or pharmaceutical compositions and/or lipid aggregates and/or lipid carriers are both present with no encapsulation of the nucleic acids within the present compounds (e.g. of Formulae I-XVI) and/or pharmaceutical compositions and/or lipid aggregates and/or lipid carriers.

[0194] Fully encapsulated indicates that the nucleic acid in the present compounds (e.g. of Formulae I-XVI) and/or pharmaceutical compositions and/or lipid aggregates and/or lipid carriers is not significantly degraded after exposure to serum or a nuclease assay that would significantly degrade free nucleic acids. In a fully encapsulated system, in embodiments, less than about 25% of particle nucleic acid is degraded in a treatment that would normally degrade about 100% of free nucleic acid. In embodiments, less than about 10% or less than about 5% of the particle nucleic acid is degraded.

[0195] Extent of encapsulation may be determined by an Oligreen assay. Oligreen is an ultra-sensitive fluorescent nucleic acid stain for quantitating oligonucleotides and single-stranded DNA in solution (available from Invitrogen Corporation, Carlsbad, Calif.).

[0196] Fully encapsulated also suggests that the present compounds (e.g. of Formulae I-XVI) and/or pharmaceutical compositions and/or lipid aggregates and/or lipid carriers are serum stable, that is, that they do not rapidly decompose into their component parts upon in vivo administration.

[0197] In embodiments, the present compounds (e.g. of Formulae I-XVI) and/or pharmaceutical compositions and/or lipid aggregates and/or lipid carriers are complexed with a nucleic acid (e.g. DNA or RNA) in different ratios depending on the target cell type, generally ranging from about 1:16 to about 25:1 ng lipid:ng RNA. Illustrative lipid:RNA ratios are from about 1:1 to about 10:1, e.g. without limitation, about 2.5:1, or about 5:1.

[0198] Additional parameters such as nucleic acid concentration, buffer type and concentration, etc., will have an effect on transfection efficiency, and can be altered by routine experimentation by a person of ordinary skill in the art.

[0199] In embodiments, the nucleic acid is selected from RNA or DNA.

[0200] In embodiments, the DNA is a plasmid, cosmid, phage, recombinant virus or other vector. In embodiments, a vector (or plasmid) refers to discrete elements that are used to, for example, introduce heterologous nucleic acid into cells for expression or replication thereof. The vectors can remain episomal or can be designed to effect integration of a gene or portion thereof into a chromosome of the genome. Also contemplated are vectors that are artificial chromosomes, such as yeast artificial chromosomes and mammalian artificial chromosomes. Selection and use of such vehicles are well known to those of skill in the art. Included are vectors capable of expressing DNA that is operatively linked with regulatory sequences, such as promoter regions, that are capable of effecting expression of such DNA fragments (e.g. expression vectors). Thus, a vector refers to a recombinant DNA or RNA construct, such as a plasmid, a phage, recombinant virus or other vector that, upon introduction into an appropriate host cell, results in expression of the DNA. Appropriate vectors are well known to those of skill in the art and include those that are replicable in eukaryotic cells and/or prokaryotic cells and those that remain episomal or those that integrate into the host cell genome.

[0201] In embodiments, the RNA is a synthetic RNA. In embodiments, the RNA is a chemically synthesized RNA. In embodiments, the RNA is an in vitro transcribed RNA.

[0202] In embodiments, the RNA is selected from an siRNA, a IncRNA, an antisense oligonucleotide, a microRNA, an antagomir, an aptamer, a ribozyme and a mRNA.

[0203] In embodiments, the synthetic RNA (inclusive, without limitation of mRNA) does not comprise a non-canonical nucleotide.

[0204] In embodiments, the synthetic RNA (inclusive, without limitation of mRNA) comprises one or more non-canonical nucleotides.

[0205] In embodiments, the one or more non-canonical nucleotides avoids substantial cellular toxicity. In embodiments, the one or more non-canonical nucleotides substantially avoids cell toxicity in vivo. In embodiments, the one or more non-canonical nucleotides substantially avoids an immune reaction in a human subject. For example, the immune reaction may be an immune response mediated by the innate immune system. Immune response can be monitored using markers known in the art (e.g. cytokines, interferons, TLRs). In embodiments, the effective dose obviates the need for treatment of the human subject with immune suppressants agents (e.g. B18R) used to moderate the residual toxicity.

[0206] In embodiments, the immune response is reduced by about 10%, about 20%, about 30%, about 40%, about 50%, about 60%, about 70%, about 80%, about 90%, about 95%, about 99%, about 99.9%, or greater than about 99.9% as compared to the immune response induced by a corresponding unmodified nucleic acid. In embodiments, upregulation of one or more immune response markers is reduced by about 10%, about 20%, about 30%, about 40%, about 50%, about 60%, about 70%, about 80%, about 90%, about 95%, about 99%, about 99.9%, or greater than about 99.9% as compared to the upregulation of the one or more immune response markers induced by a corresponding unmodified nucleic acid. In embodiments, the immune response marker comprises an mRNA or protein product of an interferon gene, including an interferon alpha gene, IFNB1, TLR3, RARRES3, EIF2AK2, STAT1, STAT2, IFIT1, IFIT2, IFIT3, IFIT5, OAS1, OAS2, OAS3, OASL, ISG20 or a fragment, variant, analogue, or family-member thereof. In embodiments, the immune response marker comprises an mRNA or protein product of an TNF gene, including an TNF alpha gene, TNFRSF1A; TNFRSF1B; LTBR; TNFRSF4; CD40; FAS; TNFRSF6B; CD27; TNFRSF8; TNFRSF9; TNFRSF10A; TNFRSF10B; TNFRSF10C; TNFRSF10D; TNFRSF11A; TNFRSF11B; TNFRSF12A; TNFRSF13B; TNFRSF13C; TNFRSF14; NGFR; TNFRSF17; TNFRSF18; TNFRSF19; TNFRSF21; TNFRSF25; and EDA2R or a fragment, variant, analogue, or family-member thereof. In embodiments, the immune response marker comprises an mRNA or protein product of an interleukin gene, including an IL-6 gene, IL-1; IL-2; IL-3; IL-4; IL-5; IL-6; IL-7; IL-8 or CXCL8; IL-9; IL-10; IL-11; IL-12; IL-13; IL-14; IL-15; IL-16; IL-17; IL-18; IL-19; IL-20; IL-21; IL-22; IL-23; IL-24; IL-25; IL-26; IL-27; IL-28; IL-29; IL-30; IL-31; IL-32; IL-33; IL-35; IL-36 or a fragment, variant, analogue, or family-member thereof.

[0207] In embodiments, cell death is about 10%, about 25%, about 50%, about 75%, about 85%, about 90%, about 95%, or over about 95% less than the cell death observed with a corresponding unmodified nucleic acid. Moreover, cell death may affect fewer than about 50%, about 40%, about 30%, about 20%, about 10%, about 5%, about 1%, about 0.1%, about 0.01% or fewer than about 0.01% of cells contacted with the modified nucleic acids.

[0208] Certain non-canonical nucleotides, when incorporated into RNA molecules, can reduce the toxicity of the RNA molecules, in part, without wishing to be bound by theory, by interfering with binding of proteins that detect exogenous nucleic acids, for example, protein kinase R, Rig-1 and the oligoadenylate synthetase family of proteins. Non-canonical nucleotides that have been reported to reduce the toxicity of RNA molecules when incorporated therein include pseudouridine, 5-methyluridine, 2-thiouridine, 5-methylcytidine, N6-methyladenosine, and certain combinations thereof. However, the chemical characteristics of non-canonical nucleotides that can enable them to lower the in vivo toxicity of RNA molecules have, until this point, remained unknown. Furthermore, incorporation of large amounts of most non-canonical nucleotides, for example, 5-methyluridine, 2-thiouridine, 5-methylcytidine, and N6-methyladenosine, can reduce the efficiency with which RNA molecules can be translated into protein, limiting the utility of RNA molecules containing these nucleotides in applications that require protein expression. In addition, while pseudouridine can be completely substituted for uridine in RNA molecules without reducing the efficiency with which the synthetic RNA molecules can be translated into protein, in certain situations, for example, when performing frequent, repeated transfections, synthetic RNA molecules containing only adenosine, guanosine, cytidine, and pseudouridine can exhibit excessive toxicity.

[0209] In embodiments, the non-canonical nucleotides have one or more substitutions at positions selected from the 2C, 4C, and 5C positions for a pyrimidine, or selected from the 6C, 7N and 8C positions for a purine.

[0210] In embodiments, the non-canonical nucleotides comprise one or more of 5-hydroxycytidine, 5-methylcytidine, 5-hydroxymethylcytidine, 5-carboxycytidine, 5-formylcytidine, 5-methoxycytidine, pseudouridine, 5-hydroxyuridine, 5-methyluridine, 5-hydroxymethyluridine, 5-carboxyuridine, 5-formyluridine, 5-methoxyuridine, 5-hydroxypseudouridine, 5-methylpseudouridine, 5-hydroxymethylpseudouridine, 5-carboxypseudouridine, 5-formylpseudouridine, and 5-methoxypseudouridine, optionally at an amount of at least 50%, or at least 60%, or at least 70%, or at least 80%, or at least 90%, or 100% of the non-canonical nucleotides.

[0211] In embodiments, at least about 50% of cytidine residues are non-canonical nucleotides, and which are selected from 5-hydroxycytidine, 5-methylcytidine, 5-hydroxymethylcytidine, 5-carboxycytidine, 5-formylcytidine, and 5-methoxycytidine.

[0212] In embodiments, at least about 75% or at least about 90% of cytidine residues are non-canonical nucleotides, and the non-canonical nucleotides are selected from 5-hydroxycytidine, 5-methylcytidine, 5-hydroxymethylcytidine, 5-carboxycytidine, 5-formylcytidine, and 5-methoxycytidine.

[0213] In embodiments, at least about 20% of uridine, or at least about 40%, or at least about 50%, or at least about 75%, or at about least 90% of uridine residues are non-canonical nucleotides, and the non-canonical are selected from pseudouridine, 5-hydroxyuridine, 5-methyluridine, 5-hydroxymethyluridine, 5-carboxyuridine, 5-formyluridine, 5-methoxyuridine, 5-hydroxypseudouridine, 5-methylpseudouridine, 5-hydroxymethylpseudouridine, 5-carboxypseudouridine, 5-formylpseudouridine, and 5-methoxypseudouridine.

[0214] In embodiments, at least about 40%, or at least about 50%, or at least about 75%, or at about least 90% of uridine residues are non-canonical nucleotides, and the non-canonical nucleotides are selected from pseudouridine, 5-hydroxyuridine, 5-methyluridine, 5-hydroxymethyluridine, 5-carboxyuridine, 5-formyluridine, 5-methoxyuridine, 5-hydroxypseudouridine, 5-methylpseudouridine, 5-hydroxymethylpseudouridine, 5-carboxypseudouridine, 5-formylpseudouridine, and 5-methoxypseudouridine.

[0215] In embodiments, at least about 10% of guanine residues are non-canonical nucleotides, and the non-canonical nucleotide is optionally 7-deazaguanosine.

[0216] In embodiments, the synthetic RNA comprises no more than about 50% 7-deazaguanosine in place of guanosine residues.

[0217] In embodiments, the synthetic RNA does not comprise non-canonical nucleotides in place of adenosine residues.

[0218] In embodiments, the invention pertains to, RNA molecules containing one or more non-canonical nucleotides that include one or more substitutions at the 2C and/or 4C and/or 5C positions in the case of a pyrimidine or the 6C and/or 7N and/or 8C positions in the case of a purine can be less toxic than synthetic RNA molecules containing only canonical nucleotides, due in part to the ability of substitutions at these positions to interfere with recognition of synthetic RNA molecules by proteins that detect exogenous nucleic acids, and furthermore, that substitutions at these positions can have minimal impact on the efficiency with which the synthetic RNA molecules can be translated into protein, due in part to the lack of interference of substitutions at these positions with base-pairing and base-stacking interactions.

[chemical structure]

[0219] Examples of non-canonical nucleotides that include one or more substitutions at the 2C and/or 4C and/or 5C positions in the case of a pyrimidine or the 6C and/or 7N and/or 8C positions in the case of a purine include, but are not limited to 2-thiouridine, 5-azauridine, pseudouridine, 4-thiouridine, 5-methyluridine, 5-methylpseudouridine, 5-aminouridine, 5-aminopseudouridine, 5-hydroxyuridine, 5-hydroxypseudouridine, 5-methoxyuridine, 5-methoxypseudouridine, 5-hydroxymethyluridine, 5-hydroxymethylpseudouridine, 5-carboxyuridine, 5-carboxypseudouridine, 5-formyluridine, 5-formylpseudouridine, 5-methyl-5-azauridine, 5-amino-5-azauridine, 5-hydroxy-5-azauridine, 5-methylpseudouridine, 5-aminopseudouridine, 5-hydroxypseudouridine, 4-thio-5-azauridine, 4-thiopseudouridine, 4-thio-5-methyluridine, 4-thio-5-aminouridine, 4-thio-5-hydroxyuridine, 4-thio-5-methyl-5-azauridine, 4-thio-5-amino-5-azauridine, 4-thio-5-hydroxy-5-azauridine, 4-thio-5-methylpseudouridine, 4-thio-5-aminopseudouridine, 4-thio-5-hydroxypseudouridine, 2-thiocytidine, 5-azacytidine, pseudoisocytidine, N4-methylcytidine, N4-aminocytidine, N4-hydroxycytidine, 5-methylcytidine, 5-aminocytidine, 5-hydroxycytidine, 5-methoxycytidine, 5-hydroxymethylcytidine, 5-carboxycytidine, 5-formylcytydine, 5-methyl-5-azacytidine, 5-amino-5-azacytidine, 5-hydroxy-5-azacytidine, 5-methylpseudoisocytidine, 5-aminopseudoisocytidine, 5-hydroxypseudoisocytidine, N4-methyl-5-azacytidine, N4-methylpseudoisocytidine, 2-thio-5-azacytidine, 2-thiopseudoisocytidine, 2-thio-N4-methylcytidine, 2-thio-N4-aminocytidine, 2-thio-N4-hydroxycytidine, 2-thio-5-methylcytidine, 2-thio-5-aminocytidine, 2-thio-5-hydroxycytidine, 2-thio-5-methyl-5-azacytidine, 2-thio-5-amino-5-azacytidine, 2-thio-5-hydroxy-5-azacytidine, 2-thio-5-methylpseudoisocytidine, 2-thio-5-aminopseudoisocytidine, 2-thio-5-hydroxypseudoisocytidine, 2-thio-N4-methyl-5-azacytidine, 2-thio-N4-methylpseudoisocytidine, N4-methyl-5-methylcytidine, N4-methyl-5-aminocytidine, N4-methyl-5-hydroxycytidine, N4-methyl-5-methyl-5-azacytidine, N4-methyl-5-amino-5-azacytidine, N4-methyl-5-hydroxy-5-azacytidine, N4-methyl-5-methylpseudoisocytidine, N4-methyl-5-aminopseudoisocytidine, N4-methyl-5-hydroxypseudoisocytidine, N4-amino-5-azacytidine, N4-aminopseudoisocytidine, N4-amino-5-methylcytidine, N4-amino-5-aminocytidine, N4-amino-5-hydroxycytidine, N4-amino-5-methyl-5-azacytidine, N4-amino-5-amino-5-azacytidine, N4-amino-5-hydroxy-5-azacytidine, N4-amino-5-methylpseudoisocytidine, N4-amino-5-aminopseudoisocytidine, N4-amino-5-hydroxypseudoisocytidine, N4-hydroxy-5-azacytidine, N4-hydroxypseudoisocytidine, N4-hydroxy-5-methylcytidine, N4-hydroxy-5-aminocytidine, N4-hydroxy-5-hydroxycytidine, N4-hydroxy-5-methyl-5-azacytidine, N4-hydroxy-5-amino-5-azacytidine, N4-hydroxy-5-hydroxy-5-azacytidine, N4-hydroxy-5-methylpseudoisocytidine, N4-hydroxy-5-aminopseudoisocytidine, N4-hydroxy-5-hydroxypseudoisocytidine, 2-thio-N4-methyl-5-methylcytidine, 2-thio-N4-methyl-5-aminocytidine, 2-thio-N4-methyl-5-hydroxycytidine, 2-thio-N4-methyl-5-methyl-5-azacytidine, 2-thio-N4-methyl-5-amino-5-azacytidine, 2-thio-N4-methyl-5-hydroxy-5-azacytidine, 2-thio-N4-methyl-5-methylpseudoisocytidine, 2-thio-N4-methyl-5-aminopseudoisocytidine, 2-thio-N4-methyl-5-hydroxypseudoisocytidine, 2-thio-N4-amino-5-azacytidine, 2-thio-N4-aminopseudoisocytidine, 2-thio-N4-amino-5-methylcytidine, 2-thio-N4-amino-5-aminocytidine, 2-thio-N4-amino-5-hydroxycytidine, 2-thio-N4-amino-5-methyl-5-azacytidine, 2-thio-N4-amino-5-amino-5-azacytidine, 2-thio-N4-amino-5-hydroxy-5-azacytidine, 2-thio-N4-amino-5-methylpseudoisocytidine, 2-thio-N4-amino-5-aminopseudoisocytidine, 2-thio-N4-amino-5-hydroxypseudoisocytidine, 2-thio-N4-hydroxy-5-azacytidine, 2-thio-N4-hydroxypseudoisocytidine, 2-thio-N4-hydroxy-5-methylcytidine, N4-hydroxy-5-aminocytidine, 2-thio-N4-hydroxy-5-hydroxycytidine, 2-thio-N4-hydroxy-5-methyl-5-azacytidine, 2-thio-N4-hydroxy-5-amino-5-azacytidine, 2-thio-N4-hydroxy-5-hydroxy-5-azacytidine, 2-thio-N4-hydroxy-5-methylpseudoisocytidine, 2-thio-N4-hydroxy-5-aminopseudoisocytidine, 2-thio-N4-hydroxy-5-hydroxypseudoisocytidine, N6-methyladenosine, N6-aminoadenosine, N6-hydroxyadenosine, 7-deazaadenosine, 8-azaadenosine, N6-methyl-7-deazaadenosine, N6-methyl-8-azaadenosine, 7-deaza-8-azaadenosine, N6-methyl-7-deaza-8-azaadenosine, N6-amino-7-deazaadenosine, N6-amino-8-azaadenosine, N6-amino-7-deaza-8-azaadenosine, N6-hydroxyadenosine, N6-hydroxy-7-deazaadenosine, N6-hydroxy-8-azaadenosine, N6-hydroxy-7-deaza-8-azaadenosine, 6-thioguanosine, 7-deazaguanosine, 8-azaguanosine, 6-thio-7-deazaguanosine, 6-thio-8-azaguanosine, 7-deaza-8-azaguanosine, 6-thio-7-deaza-8-azaguanosine, and 5-methoxyuridine.

[0220] In embodiments, the invention relates to one or more non-canonical nucleotides selected from 5-hydroxycytidine, 5-methylcytidine, 5-hydroxymethylcytidine, 5-carboxycytidine, 5-formylcytidine, 5-methoxycytidine, 5-hydroxyuridine, 5-hydroxymethyluridine, 5-carboxyuridine, 5-formyluridine, 5-methoxyuridine, pseudouridine, 5-hydroxypseudouridine, 5-methylpseudouridine, 5-hydroxymethylpseudouridine, 5-carboxypseudouridine, 5-formylpseudouridine, and 5-methoxypseudouridine. In embodiments, at least 50%, or at least 55%, or at least 60%, or at least 65%, or at least 70%, or at least 75%, or at least 80%, or at least 85%, or at least 90%, or at least 95%, or 100% of the non-canonical nucleotides are one or more of 5-hydroxycytidine, 5-methylcytidine, 5-hydroxymethylcytidine, 5-carboxycytidine, 5-formylcytidine, 5-methoxycytidine, 5-hydroxyuridine, 5-methyluridine, 5-hydroxymethyluridine, 5-carboxyuridine, 5-formyluridine, 5-methoxyuridine, pseudouridine, 5-hydroxypseudouridine, 5-methylpseudouridine, 5-hydroxymethylpseudouridine, 5-carboxypseudouridine, 5-formylpseudouridine, and 5-methoxypseudouridine.

[0221] In embodiments, at least about 50%, or at least about 55%%, or at least 60%, or at least 65%, or at least 70%, or at least 75%, or at least 80%, or at least 85%, or at least 90%, or at least 95%, or 100% of cytidine residues are non-canonical nucleotides selected from 5-hydroxycytidine, 5-methylcytidine, 5-hydroxymethylcytidine, 5-carboxycytidine, 5-formylcytidine, 5-methoxycytidine.

[0222] In embodiments, at least about 20%, or about 30%, or about 40%, or about 50%, or at least about 55%, or at least 60%, or at least 65%, or at least 70%, or at least 75%, or at least 80%, or at least 85%, or at least 90%, or at least 95%, or 100% of uridine residues are non-canonical nucleotides selected from 5-hydroxyuridine, 5-methyluridine, 5-hydroxymethyluridine, 5-carboxyuridine, 5-formyluridine, 5-methoxyuridine, pseudouridine, 5-hydroxypseudouridine, 5-methylpseudouridine, 5-hydroxymethylpseudouridine, 5-carboxypseudouridine, 5-formylpseudouridine, and 5-methoxypseudouridine.

[0223] In embodiments, at least about 10% (e.g. 10%, or about 20%, or about 30%, or about 40%, or about 50%) of guanosine residues are non-canonical nucleotides, and the non-canonical nucleotide is optionally 7-deazaguanosine. In embodiments, the RNA contains no more than about 50% 7-deazaguanosine in place of guanosine residues.

[0224] In embodiments, the RNA does not contain non-canonical nucleotides in place of adenosine residues.

[0225] Note that alternative naming schemes exist for certain non-canonical nucleotides. For example, in certain situations, 5-methylpseudouridine can be referred to as “3-methylpseudouridine” or “N3-methylpseudouridine” or “1-methylpseudouridine” or “N1-methylpseudouridine”.

[0226] Nucleotides that contain the prefix “amino” can refer to any nucleotide that contains a nitrogen atom bound to the atom at the stated position of the nucleotide, for example, 5-aminocytidine can refer to 5-aminocytidine, 5-methylaminocytidine, and 5-nitrocytidine. Similarly, nucleotides that contain the prefix “methyl” can refer to any nucleotide that contains a carbon atom bound to the atom at the stated position of the nucleotide, for example, 5-methylcytidine can refer to 5-methylcytidine, 5-ethylcytidine, and 5-hydroxymethylcytidine, nucleotides that contain the prefix “thio” can refer to any nucleotide that contains a sulfur atom bound to the atom at the given position of the nucleotide, and nucleotides that contain the prefix “hydroxy” can refer to any nucleotide that contains an oxygen atom bound to the atom at the given position of the nucleotide, for example, 5-hydroxyuridine can refer to 5-hydroxyuridine and uridine with a methyl group bound to an oxygen atom, where the oxygen atom is bound to the atom at the 5C position of the uridine.

[0227] Certain embodiments are therefore directed to RNA comprising one or more non-canonical nucleotides, where the RNA molecule contains one or more nucleotides that includes one or more substitutions at the 2C and/or 4C and/or 5C positions in the case of a pyrimidine or the 6C and/or 7N and/or 8C positions in the case of a purine. In embodiments, the non-canonical nucleotides include at least one of pseudouridine, 2-thiouridine, 4-thiouridine, 5-azauridine, 5-hydroxyuridine, 5-methyluridine, 5-aminouridine, 2-thiopseudouridine, 4-thiopseudouridine, 5-hydroxypseudouridine, 5-methylpseudouridine, 5-aminopseudouridine, pseudoisocytidine, N4-methylcytidine, 2-thiocytidine, 5-azacytidine, 5-hydroxycytidine, 5-aminocytidine, 5-methylcytidine, N4-methylpseudoisocytidine, 2-thiopseudoisocytidine, 5-hydroxypseudoisocytidine, 5-aminopseudoisocytidine, 5-methylpseudoisocytidine, 7-deazaadenosine, 7-deazaguanosine, 6-thioguanosine, and 6-thio-7-deazaguanosine. In another embodiment, the one or more nucleotides includes at least one of pseudouridine, 2-thiouridine, 4-thiouridine, 5-azauridine, 5-hydroxyuridine, 5-methyluridine, 5-aminouridine, 2-thiopseudouridine, 4-thiopseudouridine, 5-hydroxypseudouridine, 5-methylpseudouridine, and 5-aminopseudouridine and at least one of pseudoisocytidine, N4-methylcytidine, 2-thiocytidine, 5-azacytidine, 5-hydroxycytidine, 5-aminocytidine, 5-methylcytidine, N4-methylpseudoisocytidine, 2-thiopseudoisocytidine, 5-hydroxypseudoisocytidine, 5-aminopseudoisocytidine, and 5-methylpseudoisocytidine. In still another embodiment, the one or more nucleotides include at least one of pseudouridine, 2-thiouridine, 4-thiouridine, 5-azauridine, 5-hydroxyuridine, 5-methyluridine, 5-aminouridine, 2-thiopseudouridine, 4-thiopseudouridine, 5-hydroxypseudouridine, and 5-methylpseudouridine, 5-aminopseudouridine and at least one of pseudoisocytidine, N4-methylcytidine, 2-thiocytidine, 5-azacytidine, 5-hydroxycytidine, 5-aminocytidine, 5-methylcytidine, N4-methylpseudoisocytidine, 2-thiopseudoisocytidine, 5-hydroxypseudoisocytidine, 5-aminopseudoisocytidine, and 5-methylpseudoisocytidine and at least one of 7-deazaguanosine, 6-thioguanosine, 6-thio-7-deazaguanosine, and 5-methoxyuridine. In yet another embodiment, the one or more nucleotides includes 5-methylcytidine and 7-deazaguanosine. In another embodiment, the one or more nucleotides also includes pseudouridine or 4-thiouridine or 5-methyluridine or 5-aminouridine or 4-thiopseudouridine or 5-methylpseudouridine or 5-aminopseudouridine. In a still another embodiment, the one or more nucleotides also includes 7-deazaadenosine. In another embodiment, the one or more nucleotides includes pseudoisocytidine and 7-deazaguanosine and 4-thiouridine. In yet another embodiment, the one or more nucleotides includes pseudoisocytidine or 7-deazaguanosine and pseudouridine. In still another embodiment, the one or more nucleotides includes 5-methyluridine and 5-methylcytidine and 7-deazaguanosine. In a further embodiment, the one or more nucleotides includes pseudouridine or 5-methylpseudouridine and 5-methylcytidine and 7-deazaguanosine. In another embodiment, the one or more nucleotides includes pseudoisocytidine and 7-deazaguanosine and pseudouridine. In one embodiment, the RNA comprising one or more non-canonical nucleotides is present in vivo.

[0228] Certain non-canonical nucleotides can be incorporated more efficiently than other non-canonical nucleotides into RNA molecules by RNA polymerases that are commonly used for in vitro transcription, due in part to the tendency of these certain non-canonical nucleotides to participate in standard base-pairing interactions and base-stacking interactions, and to interact with the RNA polymerase in a manner similar to that in which the corresponding canonical nucleotide interacts with the RNA polymerase. As a result, certain nucleotide mixtures containing one or more non-canonical nucleotides can be beneficial in part because in vitro-transcription reactions containing these nucleotide mixtures can yield a large quantity of RNA. Certain embodiments are therefore directed to a nucleotide mixture containing one or more nucleotides that includes one or more substitutions at the 2C and/or 4C and/or 5C positions in the case of a pyrimidine or the 6C and/or 7N and/or 8C positions in the case of a purine. Nucleotide mixtures include, but are not limited to (numbers preceding each nucleotide indicate an illustrative fraction of the non-canonical nucleotide triphosphate in an in vitro-transcription reaction, for example, 0.2 pseudoisocytidine refers to a reaction containing adenosine-5′-triphosphate, guanosine-5′-triphosphate, uridine-5′-triphosphate, cytidine-5′-triphosphate, and pseudoisocytidine-5′-triphosphate, where pseudoisocytidine-5′-triphosphate is present in the reaction at an amount approximately equal to 0.2 times the total amount of pseudoisocytidine-5′-triphosphate+cytidine-5′-triphosphate that is present in the reaction, with amounts measured either on a molar or mass basis, and where more than one number preceding a nucleoside indicates a range of illustrative fractions): 1.0 pseudouridine, 0.1-0.8 2-thiouridine, 0.1-0.8 5-methyluridine, 0.2-1.05-hydroxyuridine, 0.2-1.05-methoxyuridine, 0.1-1.05-aminouridine, 0.1-1.04-thiouridine, 0.1-1.02-thiopseudouridine, 0.1-1.04-thiopseudouridine, 0.1-1.05-hydroxypseudouridine, 0.2-1 5-methylpseudouridine, 0.2-1.05-methoxypseudouridine, 0.1-1.05-aminopseudouridine, 0.2-1.02-thiocytidine, 0.1-0.8 pseudoisocytidine, 0.2-1.05-methylcytidine, 0.2-1.05-hydroxycytidine, 0.2-1.05-hydroxymethylcytidine, 0.2-1.05-methoxycytidine, 0.1-1.05-aminocytidine, 0.2-1.0N4-methylcytidine, 0.2-1.05-methylpseudoisocytidine, 0.2-1.05-hydroxypseudoisocytidine, 0.2-1.05-aminopseudoisocytidine, 0.2-1.0N4-methylpseudoisocytidine, 0.2-1.0 2-thiopseudoisocytidine, 0.2-1.07-deazaguanosine, 0.2-1.06-thioguanosine, 0.2-1.06-thio-7-deazaguanosine, 0.2-1.08-azaguanosine, 0.2-1.07-deaza-8-azaguanosine, 0.2-1.06-thio-8-azaguanosine, 0.1-0.5 7-deazaadenosine, and 0.1-0.5 N6-methyladenosine.

[0229] In embodiments, the RNA comprising one or more non-canonical nucleotides composition or synthetic polynucleotide composition (e.g., which may be prepared by in vitro transcription) contains substantially or entirely the canonical nucleotide at positions having adenine or “A” in the genetic code. The term “substantially” in this context refers to at least 90%. In these embodiments, the RNA composition or synthetic polynucleotide composition may further contain (e.g., consist of) 7-deazaguanosine at positions with “G” in the genetic code as well as the corresponding canonical nucleotide “G”, and the canonical and non-canonical nucleotide at positions with G may be in the range of 5:1 to 1:5, or in embodiments in the range of 2:1 to 1:2. In these embodiments, the RNA composition or synthetic polynucleotide composition may further contain (e.g., consist of) one or more (e.g., two, three or four) of 5-hydroxycytidine, 5-methylcytidine, 5-hydroxymethylcytidine, 5-carboxycytidine, 5-formylcytidine, 5-methoxycytidine at positions with “C” in the genetic code as well as the canonical nucleotide “C”, and the canonical and non-canonical nucleotide at positions with C may be in the range of 5:1 to 1:5, or in embodiments in the range of 2:1 to 1:2. In embodiments, the level of non-canonical nucleotide at positions of “C” are as described in the preceding paragraph. In these embodiments, the RNA composition or synthetic polynucleotide composition may further contain (e.g., consist of) one or more (e.g., two, three, or four) of 5-hydroxyuridine, 5-methyluridine, 5-hydroxymethyluridine, 5-carboxyuridine, 5-formyluridine, 5-methoxyuridine, pseudouridine, 5-hydroxypseudouridine, 5-methylpseudouridine, 5-hydroxymethylpseudouridine, 5-carboxypseudouridine, 5-formylpseudouridine, and 5-methoxypseudouridineat positions with “U” in the genetic code as well as the canonical nucleotide “U”, and the canonical and non-canonical nucleotide at positions with “U” may be in the range of 5:1 to 1:5, or in some embodiments in the range of 2:1 to 1:2. In embodiments, the level of non-canonical nucleotide at positions of “U” are as described in the preceding paragraph.

[0230] Combining certain non-canonical nucleotides can be beneficial in part because the contribution of non-canonical nucleotides to lowering the toxicity of RNA molecules can be additive. Embodiments are therefore directed to a nucleotide mixture, where the nucleotide mixture contains more than one of the non-canonical nucleotides listed above, for example, the nucleotide mixture contains both pseudoisocytidine and 7-deazaguanosine or the nucleotide mixture contains both N4-methylcytidine and 7-deazaguanosine, etc. In one embodiment, the nucleotide mixture contains more than one of the non-canonical nucleotides listed above, and each of the non-canonical nucleotides is present in the mixture at the fraction listed above, for example, the nucleotide mixture contains 0.1-0.8 pseudoisocytidine and 0.2-1.07-deazaguanosine or the nucleotide mixture contains 0.2-1.0N4-methylcytidine and 0.2-1.07-deazaguanosine, etc.

[0231] In certain situations, for example, when it may not be necessary or desirable to maximize the yield of an in vitro-transcription reaction, nucleotide fractions other than those given above may be used. The illustrative fractions and ranges of fractions listed above relate to nucleotide-triphosphate solutions of typical purity (greater than 90% purity). Larger fractions of these and other nucleotides can be used by using nucleotide-triphosphate solutions of greater purity, for example, greater than about 95% purity or greater than about 98% purity or greater than about 99% purity or greater than about 99.5% purity, which can be achieved, for example, by purifying the nucleotide triphosphate solution using existing chemical-purification technologies such as high-pressure liquid chromatography (HPLC) or by other means. In one embodiment, nucleotides with multiple isomers are purified to enrich the desired isomer.

[0232] Other embodiments are directed to a method for inducing a cell in vivo to express a protein of interest by contacting the cell with the present compounds (e.g. of Formulae I-XVI) and/or pharmaceutical compositions and/or lipid aggregates and/or lipid carriers and a RNA molecule that contains one or more non-canonical nucleotides that includes one or more substitutions at the 2C and/or 4C and/or 5C positions in the case of a pyrimidine or the 6C and/or 7N and/or 8C positions in the case of a purine. Still other embodiments are directed to a method for transfecting, reprogramming, and/or gene-editing a cell in vivo by contacting the cell with the present compounds (e.g. of Formulae I-XVI) and/or pharmaceutical compositions and/or lipid aggregates and/or lipid carriers and a RNA molecule that contains one or more non-canonical nucleotides that includes one or more substitutions at the 2C and/or 4C and/or 5C positions in the case of a pyrimidine or the 6C and/or 7N and/or 8C positions in the case of a purine. In one embodiment, the RNA molecule is produced by in vitro transcription. In one embodiment, the RNA molecule encodes one or more reprogramming factors. In another embodiment, the one or more reprogramming factors includes Oct4 protein. In another embodiment, the cell is also contacted with a RNA molecule that encodes Sox2 protein. In yet another embodiment, the cell is also contacted with a RNA molecule that encodes Klf4 protein. In yet another embodiment, the cell is also contacted with a RNA molecule that encodes c-Myc protein. In yet another embodiment, the cell is also contacted with a RNA molecule that encodes Lin28 protein.

[0233] Enzymes such as T7 RNA polymerase may preferentially incorporate canonical nucleotides in an in vitro-transcription reaction containing both canonical and non-canonical nucleotides. As a result, an in vitro-transcription reaction containing a certain fraction of a non-canonical nucleotide may yield RNA containing a different, often lower, fraction of the non-canonical nucleotide than the fraction at which the non-canonical nucleotide was present in the reaction. In certain embodiments, references to nucleotide incorporation fractions (for example, “a synthetic RNA molecule containing 50% pseudoisocytidine” or “0.1-0.8 pseudoisocytidine”) therefore can refer both to RNA molecules containing the stated fraction of the nucleotide, and to RNA molecules synthesized in a reaction containing the stated fraction of the nucleotide (or nucleotide derivative, for example, nucleotide-triphosphate), even though such a reaction may yield RNA containing a different fraction of the nucleotide than the fraction at which the non-canonical nucleotide was present in the reaction.

[0234] Different nucleotide sequences can encode the same protein by utilizing alternative codons. In certain embodiments, references to nucleotide incorporation fractions therefore can refer both to RNA molecules containing the stated fraction of the nucleotide, and to RNA molecules encoding the same protein as a different RNA molecule, where the different RNA molecule contains the stated fraction of the nucleotide.

[0235] The non-canonical nucleotide members of the 5-methylcytidine de-methylation pathway, when incorporated into synthetic RNA, can increase the efficiency with which the synthetic RNA can be translated into protein in vivo, and can decrease the toxicity of the synthetic RNA in vivo. These non-canonical nucleotides include, for example: 5-methylcytidine, 5-hydroxymethylcytidine, 5-formylcytidine, and 5-carboxycytidine (a.k.a. “cytidine-5-carboxylic acid”). Certain embodiments are therefore directed to a nucleic acid. In embodiments, the nucleic acid is present in vivo. In one embodiment, the nucleic acid is a synthetic RNA molecule. In another embodiment, the nucleic acid comprises one or more non-canonical nucleotides. In one embodiment, the nucleic acid comprises one or more non-canonical nucleotide members of the 5-methylcytidine de-methylation pathway. In another embodiment, the nucleic acid comprises at least one of 5-methylcytidine, 5-hydroxymethylcytidine, 5-formylcytidine, and 5-carboxycytidine or a derivative thereof. In a further embodiment, the nucleic acid comprises at least one of pseudouridine, 5-methylpseudouridine, 5-hydroxyuridine, 5-methyluridine, 5-methylcytidine, 5-hydroxymethylcytidine, N4-methylcytidine, N4-acetylcytidine, and 7-deazaguanosine or a derivative thereof. 5-methylcytidine De-Methylation Pathway

[chemical structure]

[0236] Certain combinations of non-canonical nucleotides can be particularly effective at increasing the efficiency with which synthetic RNA can be translated into protein in vivo, and decreasing the toxicity of synthetic RNA in vivo, for example, the combinations: 5-methyluridine and 5-methylcytidine, 5-hydroxyuridine and 5-methylcytidine, 5-hydroxyuridine and 5-hydroxymethylcytidine, 5-methyluridine and 7-deazaguanosine, 5-methylcytidine and 7-deazaguanosine, 5-methyluridine, 5-methylcytidine, and 7-deazaguanosine, and 5-methyluridine, 5-hydroxymethylcytidine, and 7-deazaguanosine. Certain embodiments are therefore directed to a nucleic acid comprising at least two of 5-methyluridine, 5-methylcytidine, 5-hydroxymethylcytidine, and 7-deazaguanosine or one or more derivatives thereof. Other embodiments are directed to a nucleic acid comprising at least three of 5-methyluridine, 5-methylcytidine, 5-hydroxymethylcytidine, and 7-deazaguanosine or one or more derivatives thereof. Other embodiments are directed to a nucleic acid comprising all of 5-methyluridine, 5-methylcytidine, 5-hydroxymethylcytidine, and 7-deazaguanosine or one or more derivatives thereof. In one embodiment, the nucleic acid comprises one or more 5-methyluridine residues, one or more 5-methylcytidine residues, and one or more 7-deazaguanosine residues or one or more 5-methyluridine residues, one or more 5-hydroxymethylcytidine residues, and one or more 7-deazaguanosine residues.

[0237] Synthetic RNA molecules containing certain fractions of certain non-canonical nucleotides and combinations thereof can exhibit particularly high translation efficiency and low toxicity in vivo. Certain embodiments are therefore directed to a nucleic acid comprising at least one of one or more uridine residues, one or more cytidine residues, and one or more guanosine residues, and comprising one or more non-canonical nucleotides. In one embodiment, between about 20% and about 80% of the uridine residues are 5-methyluridine residues. In another embodiment, between about 30% and about 50% of the uridine residues are 5-methyluridine residues. In a further embodiment, about 40% of the uridine residues are 5-methyluridine residues. In one embodiment, between about 60% and about 80% of the cytidine residues are 5-methylcytidine residues. In another embodiment, between about 80% and about 100% of the cytidine residues are 5-methylcytidine residues. In a further embodiment, about 100% of the cytidine residues are 5-methylcytidine residues. In a still further embodiment, between about 20% and about 100% of the cytidine residues are 5-hydroxymethylcytidine residues. In one embodiment, between about 20% and about 80% of the guanosine residues are 7-deazaguanosine residues. In another embodiment, between about 40% and about 60% of the guanosine residues are 7-deazaguanosine residues. In a further embodiment, about 50% of the guanosine residues are 7-deazaguanosine residues. In one embodiment, between about 20% and about 80% or between about 30% and about 60% or about 40% of the cytidine residues are N4-methylcytidine and/or N4-acetylcytidine residues. In another embodiment, each cytidine residue is a 5-methylcytidine residue. In a further embodiment, about 100% of the cytidine residues are 5-methylcytidine residues and/or 5-hydroxymethylcytidine residues and/or N4-methylcytidine residues and/or N4-acetylcytidine residues and/or one or more derivatives thereof. In a still further embodiment, about 40% of the uridine residues are 5-methyluridine residues, between about 20% and about 100% of the cytidine residues are N4-methylcytidine and/or N4-acetylcytidine residues, and about 50% of the guanosine residues are 7-deazaguanosine residues. In one embodiment, about 40% of the uridine residues are 5-methyluridine residues and about 100% of the cytidine residues are 5-methylcytidine residues. In another embodiment, about 40% of the uridine residues are 5-methyluridine residues and about 50% of the guanosine residues are 7-deazaguanosine residues. In a further embodiment, about 100% of the cytidine residues are 5-methylcytidine residues and about 50% of the guanosine residues are 7-deazaguanosine residues. In a further embodiment, about 100% of the uridine residues are 5-hydroxyuridine residues. In one embodiment, about 40% of the uridine residues are 5-methyluridine residues, about 100% of the cytidine residues are 5-methylcytidine residues, and about 50% of the guanosine residues are 7-deazaguanosine residues. In another embodiment, about 40% of the uridine residues are 5-methyluridine residues, between about 20% and about 100% of the cytidine residues are 5-hydroxymethylcytidine residues, and about 50% of the guanosine residues are 7-deazaguanosine residues. In embodiments, less than 100% of the cytidine residues are 5-methylcytidine residues. In other embodiments, less than 100% of the cytidine residues are 5-hydroxymethylcytidine residues. In one embodiment, each uridine residue in the synthetic RNA molecule is a pseudouridine residue or a 5-methylpseudouridine residue. In another embodiment, about 100% of the uridine residues are pseudouridine residues and/or 5-methylpseudouridine residues. In a further embodiment, about 100% of the uridine residues are pseudouridine residues and/or 5-methylpseudouridine residues, about 100% of the cytidine residues are 5-methylcytidine residues, and about 50% of the guanosine residues are 7-deazaguanosine residues.

[0238] Other non-canonical nucleotides that can be used in place of or in combination with 5-methyluridine include, but are not limited to pseudouridine, 5-hydroxyuridine, 5-hydroxypseudouridine, 5-methoxyuridine, 5-methoxypseudouridine, 5-carboxyuridine, 5-carboxypseudouridine, 5-formyluridine, 5-formylpseudouridine, 5-hydroxymethyluridine, 5-hydroxymethylpseudouridine, and 5-methylpseudouridine (“1-methylpseudouridine”, “N1-methylpseudouridine”) or one or more derivatives thereof. Other non-canonical nucleotides that can be used in place of or in combination with 5-methylcytidine and/or 5-hydroxymethylcytidine include, but are not limited to pseudoisocytidine, 5-methylpseudoisocytidine, 5-hydroxymethylcytidine, 5-formylcytidine, 5-carboxycytidine, 5-methoxycytidine, N4-methylcytidine, N4-acetylcytidine or one or more derivatives thereof. In certain embodiments, for example, when performing only a single transfection, injection or delivery or when the cells, tissue, organ or patient being transfected, injected or delivered to are not particularly sensitive to transfection-associated toxicity or innate-immune signaling, the fractions of non-canonical nucleotides can be reduced. Reducing the fraction of non-canonical nucleotides can be beneficial, in part, because reducing the fraction of non-canonical nucleotides can reduce the cost of the nucleic acid. In certain situations, for example, when minimal immunogenicity of the nucleic acid is desired, the fractions of non-canonical nucleotides can be increased.

[0239] Enzymes such as T7 RNA polymerase may preferentially incorporate canonical nucleotides in an in vitro-transcription reaction containing both canonical and non-canonical nucleotides. As a result, an in vitro-transcription reaction containing a certain fraction of a non-canonical nucleotide may yield RNA containing a different, often lower, fraction of the non-canonical nucleotide than the fraction at which the non-canonical nucleotide was present in the reaction. In certain embodiments, references to nucleotide incorporation fractions (for example, “50% 5-methyluridine”) therefore can refer both to nucleic acids containing the stated fraction of the nucleotide, and to nucleic acids synthesized in a reaction containing the stated fraction of the nucleotide (or nucleotide derivative, for example, nucleotide-triphosphate), even though such a reaction may yield a nucleic acid containing a different fraction of the nucleotide than the fraction at which the non-canonical nucleotide was present in the reaction. In addition, different nucleotide sequences can encode the same protein by utilizing alternative codons. In certain embodiments, references to nucleotide incorporation fractions therefore can refer both to nucleic acids containing the stated fraction of the nucleotide, and to nucleic acids encoding the same protein as a different nucleic acid, where the different nucleic acid contains the stated fraction of the nucleotide.

[0240] Certain embodiments are directed to a nucleic acid comprising a 5′-cap structure selected from Cap 0, Cap 1, Cap 2, and Cap 3 or a derivative thereof. In one embodiment, the nucleic acid comprises one or more UTRs. In another embodiment, the one or more UTRs increase the stability of the nucleic acid. In a further embodiment, the one or more UTRs comprise an alpha-globin or beta-globin 5′-UTR. In a still further embodiment, the one or more UTRs comprise an alpha-globin or beta-globin 3′-UTR. In a still further embodiment, the synthetic RNA molecule comprises an alpha-globin or beta-globin 5′-UTR and an alpha-globin or beta-globin 3′-UTR. Certain embodiments are directed to a nucleic acid comprising a post-transcriptional regulatory element. In one embodiment, the post-transcriptional regulatory element is selected from Woodchuck Hepatitis Virus (WHP) Posttranscriptional Regulatory Element (WPRE), Hepatitis B virus Posttranscriptional Regulatory Element (HPRE), chicken lysozyme matrix attachment region (cMAR), and 5′-DNase I-hypersensitive sites 4 (cHS4). In another embodiment, the one or more UTRs include WPRE. In a further embodiment, the synthetic RNA molecule comprises an alpha-globin or beta-globin 5′-UTR and a 3′-UTR comprising WPRE. In a still further embodiment, the synthetic RNA molecule comprises one or more copies of WPRE in addition to an alpha-globin or beta-globin 5′-UTR and an alpha-globin or beta-globin 3′-UTR. Illustrative WPRE elements of the invention are SEQ ID NO: 813, SEQ ID NO: 814, SEQ ID NO: 815, SEQ ID NO: 816, SEQ ID NO: 817, and SEQ ID NO: 818.

[0241] In one embodiment, the 5′-UTR comprises a Kozak sequence that is substantially similar to the Kozak consensus sequence. In another embodiment, the nucleic acid comprises a 3′-poly(A) tail. In a further embodiment, the 3′-poly(A) tail is between about 20 nt and about 250 nt or between about 120 nt and about 150 nt long. In a further embodiment, the 3′-poly(A) tail is about 20 nt, or about 30 nt, or about 40 nt, or about 50 nt, or about 60 nt, or about 70 nt, or about 80 nt, or about 90 nt, or about 100 nt, or about 110 nt, or about 120 nt, or about 130 nt, or about 140 nt, or about 150 nt, or about 160 nt, or about 170 nt, or about 180 nt, or about 190 nt, or about 200 nt, or about 210 nt, or about 220 nt, or about 230 nt, or about 240 nt, or about 250 nt long.

[0242] Poly(A) tails produced by poly(A) polymerase may vary in length depending on reaction conditions including reaction time and enzyme activity, and that an enzymatic tailing reaction may produce a mixture of RNA molecules having poly(A) tails of varied lengths. Certain embodiments are directed to a synthetic RNA molecule containing a tail of about 10, about 20, about 30, about 40, about 50, about 75, about 100, about 125, about 150, about 175, about 200, about 225, about 250, about 275, about 300, about 325, about 350, or about 400, or more than about 400 nucleotides. In one embodiment, the tail is a poly(A) tail. Other embodiments are directed to a tail containing fewer than about 10 nucleotides.

[0243] Synthesizing RNA using a template that encodes a tail can enable increased control over the length of the tail and reduced variability within or among reactions. Certain embodiments are therefore directed to a template encoding a tail. In certain embodiments, the tail contains about 10, about 20, about 30, about 40, about 50, about 75, about 100, about 125, about 150, about 175, about 200, about 225, about 250, about 275, about 300, about 325, about 350, or about 400 nucleotides. Other embodiments are directed to a synthetic RNA molecule synthesized using a template that encodes a tail.

[0244] Inclusion of nucleotides other than adenosine within the tail can enhance stability and/or translation efficiency of a synthetic RNA molecule and improve fidelity of template DNA production in bacteria. Some embodiments are therefore directed to a synthetic RNA molecule comprising a tail, where the tail comprises adenosine nucleotides and one or more other nucleotides. Other embodiments are directed to a template that encodes a tail, where the tail comprises deoxyadenosine nucleotides and one or more other nucleotides. In one embodiment, the tail includes guanosine nucleotides. In another embodiment, the tail includes cytosine nucleotides. In a further embodiment, the tail includes uridine nucleotides. In a still further embodiment, the tail includes one or more chemically modified nucleotides and/or non-canonical nucleotides. In various embodiments, the other nucleotides are incorporated at regularly spaced intervals, or at random intervals, or in pairs or groups of adjacent nucleotides separated by one or more adenosine nucleotides. In one embodiment, the tail includes deoxyguanosine nucleotides. In another embodiment, the tail includes deoxycytosine nucleotides. In a further embodiment, the tail includes deoxyuridine nucleotides. In various embodiments, the other nucleotides are incorporated at regularly spaced intervals, or at random intervals, or in pairs or groups of adjacent nucleotides separated by one or more deoxyadenosine nucleotides. In embodiments, the tail region is comprised of about 2%-10% non-uridine nucleotides, about 10%-20% non-uridine nucleotides, about 20%-35% non-uridine nucleotides.

[0245] Inclusion of a stem-loop structure before or after the tail can enhance stability and/or translation efficiency of a synthetic RNA molecule. Some embodiments are therefore directed to a synthetic RNA molecule comprising a tail and a stem-loop structure. In various embodiments, the stem-loop structure appears before the tail, after the tail, or before or after the tail. In certain embodiments, the stem-loop structure is a histone 3′ UTR stem-loop. In certain embodiments, the sequence of the stem-loop structure is A(G(Y(Y(Y(UUYUNA)R)R)R)C)A or M(G(G(C(Y(C(UUUUMA)G)R)G)C)C)A or A(G(G(Y(Y(Y(UHHUHA)R)R)R)C)C)A.

[0246] An aspect of the present invention is a composition comprising a DNA template comprising: (a) a sequence encoding a protein, (b) a tail region comprising deoxyadenosine nucleotides and one or more other nucleotides, and (c) a restriction enzyme binding site.

[0247] In embodiments, the length of the tail region is between about 80 base pairs and about 120 base pairs, about 120 base pairs and about 160 base pairs, about 160 base pairs and about 200 base pairs, about 200 base pairs and about 240 base pairs, about 240 base pairs and about 280 base pairs, or about 280 base pairs and about 320 base pairs.

[0248] In embodiments, the length of the tail region is greater than 320 base pairs.

[0249] In embodiments, the tail region comprises about 1%, about 2%, about 5%, about 10%, about 15%, about 20%, about 25%, about 30%, about 35%, about 40%, about 45%, or about 50% guanosine residues.

[0250] In embodiments, the tail region comprises about 1%, about 2%, about 5%, about 10%, about 15%, about 20%, about 25%, about 30%, about 35%, about 40%, about 45%, or about 50% cytidine residues.

[0251] In embodiments, the tail region comprises about 1%, about 2%, about 5%, about 10%, about 15%, about 20%, about 25%, about 30%, about 35%, about 40%, about 45%, or about 50% uridine residues.

[0252] In any of the preceding embodiments and aspects, the tail region comprises about 99%, about 98%, about 95%, about 90%, about 85%, about 80%, about 75%, about 70%, about 65%, about 60%, about 55%, or about 50% adenosine residues.

[0253] In embodiments, the synthetic RNA comprises about 200 nucleotides to about 5000 nucleotides.

[0254] In embodiments, the synthetic RNA comprises from about 500 to about 2000 nucleotides, or about 500 to about 1500 nucleotides, or about 500 to about 1000 nucleotides.

### Proteins of Interest

[0255] In embodiments, the compound, pharmaceutical composition, or lipid aggregate described herein is complexed with or associates with a nucleic acid (e.g. DNA or RNA, e.g. mRNA) and the nucleic acid encodes a recombinant protein of interest.

[0256] In embodiments, the recombinant protein of interest is a soluble protein.

[0257] In embodiments, the protein of interest is selected from Table 2B.

[0258] In embodiments, the soluble protein is one or more reprogramming factors. In embodiments, the one or more reprogramming factors is selected from Oct4, Sox2, Klf4, c-Myc, I-Myc, Tert, Nanog, Lin28, Utf1, Aicda, miR200 micro-RNA, miR302 micro-RNA, miR367 micro-RNA, miR369 micro-RNA and biologically active fragments, analogues, variants and family-members thereof.

[0259] In embodiments, the recombinant protein of interest is a gene-editing protein. In embodiments, the gene-editing protein is selected from a nuclease, a transcription activator-like effector nuclease (TALEN), a zinc-finger nuclease, a meganuclease, a nickase, a clustered regularly interspaced short palindromic repeat (CRISPR)-associated protein, CRISPR/Cas9, Cas9, xCas9, Cas12a (Cpf1), Cas13a, Cas14, CasX, CasY, a Class 1 Cas protein, a Class 2 Cas protein, and MAD7, or a natural or engineered variant, family-member, orthologue, fragment or fusion construct thereof.

[0260] In embodiments, the gene-editing protein comprises a DNA-binding domain comprising a plurality of repeat sequences and at least one of the repeat sequences comprises the amino acid sequence LTPvQVVAIAwxyza (SEQ ID NO: 819), wherein each of “v”, “w”, “x”, and “y”, is independently selected from A, C, D, E, F, G, H, I, K, L, M, N, P, Q, R, S, T, V, W, Y and null; “z” is selected from GGRPALE (SEQ ID NO: 820), GGKQALE (SEQ ID NO: 821), GGKQALETVQRLLPVLCQD (SEQ ID NO: 630), GGKQALETVQRLLPVLCQA (SEQ ID NO: 631), GKQALETVQRLLPVLCQD (SEQ ID NO: 824), and GKQALETVQRLLPVLCQA (SEQ ID NO: 825), and “a” is any four consecutive amino acids or null. In embodiments, “v” is Q, D or E, “w” is S or N, “x” is I, H, N, or I, and “y” is D, A, I, N, H, K, S, G or null. In embodiments, repeat sequence is between 36 and 39 amino acids long (e.g. 36, or 37, or 38, or 39 amino acids long).

[0261] In embodiments, a comprises at least one glycine (G) residue. In embodiments, a comprises at least one histidine (H) residue. In embodiments, a comprises at least one histidine (H) residue at any one of positions 33, 34, or 35.

[0262] In embodiments, a comprises at least one aspartic acid (D) residue. In embodiments, a comprises at least one, or two, or three of a glycine (G) residue, a histidine (H) residue, and an aspartic acid (D) residue.

[0263] In embodiments, a comprises one or more hydrophilic residues, optionally selected from: a polar and positively charged hydrophilic amino acid, optionally selected from arginine (R) and lysine (K); a polar and neutral of charge hydrophilic amino acid, optionally selected from asparagine (N), glutamine (Q), serine (S), threonine (T), proline (P), and cysteine (C); a polar and negatively charged hydrophilic amino acid, optionally selected from aspartate (D) and glutamate (E), and an aromatic, polar and positively charged hydrophilic amino acid, optionally selected from histidine (H).

[0264] In some embodiments, a comprises one or more polar and positively charged hydrophilic amino acids selected from arginine (R) and lysine (K). In some embodiments, a comprises one or more polar and neutral of charge hydrophilic amino acids selected from asparagine (N), glutamine (Q), serine (S), threonine (T), proline (P), and cysteine (C). In some embodiments, a comprises one or more polar and negatively charged hydrophilic amino acids selected from aspartate (D) and glutamate (E). In some embodiments, a comprises one or more aromatic, polar and positively charged hydrophilic amino acids selected from histidine (H).

[0265] In embodiments, a comprises one or more hydrophobic residues, optionally selected from: a hydrophobic, aliphatic amino acid, optionally selected from glycine (G), alanine (A), leucine (L), isoleucine (I), methionine (M), and valine (V), and a hydrophobic, aromatic amino acid, optionally selected from phenylalanine (F), tryptophan (W), and tyrosine (Y). In some embodiments, a comprises one or more hydrophobic, aliphatic amino acids selected from glycine (G), alanine (A), leucine (L), isoleucine (I), methionine (M), and valine (V). In some embodiments, a comprises one or more aromatic amino acids selected from phenylalanine (F), tryptophan (W), and tyrosine (Y).

[0266] In embodiments, a is defined by GabG, where “a” and “b” is independently selected from A, C, D, E, F, G, H, I, K, L, M, N, P, Q, R, S, T, V, W, Y and null.

[0267] In embodiments, a is selected from GHGG (SEQ ID NO: 828), HGSG (SEQ ID NO: 829), HGGG (SEQ ID NO: 830), GGHD (SEQ ID NO: 831), GAHD (SEQ ID NO: 832), AHDG (SEQ ID NO: 833), PHDG (SEQ ID NO: 834), GPHD (SEQ ID NO: 835), GHGP (SEQ ID NO: 836), PHGG (SEQ ID NO: 837), PHGP (SEQ ID NO: 838), AHGA (SEQ ID NO: 839), LHGA (SEQ ID NO: 840), VHGA (SEQ ID NO: 841), IVHG (SEQ ID NO: 842), IHGM (SEQ ID NO: 843), RDHG (SEQ ID NO: 845), RHGE (SEQ ID NO: 846), HRGE (SEQ ID NO: 847), RHGD (SEQ ID NO: 848), HRGD (SEQ ID NO: 849), GPYE (SEQ ID NO: 850), NHGG (SEQ ID NO: 851), THGG (SEQ ID NO: 852), GTHG (SEQ ID NO: 853), GSGS (SEQ ID NO: 854), GSGG (SEQ ID NO: 855), GGGG (SEQ ID NO: 856), GRGG (SEQ ID NO: 857), and GKGG (SEQ ID NO: 858).

[0268] In embodiments, the gene-editing protein comprises a DNA-binding domain comprising a plurality of repeat sequences and at least one of the repeat sequences comprises the amino acid sequence: LTPvQVVAIAwxyzGHGG (SEQ ID NO:629) and is between 36 and 39 amino acids long, wherein: “v” is Q, D or E, “w” is S or N, “x” is H, N, or I, “y” is D, A, I, N, G, H, K, S, or null, and “z” is GGKQALETVQRLLPVLCQD (SEQ ID NO: 630) or GGKQALETVQRLLPVLCQA (SEQ ID NO: 631).

[0269] In embodiments, the gene-editing protein further comprises a nuclease domain comprising a catalytic domain of a nuclease.

[0270] In embodiments, the gene-editing protein is capable of creating a single-strand or double-strand break in the gene.

[0271] In embodiments, the single-strand or double-strand break causes persistent altered splicing of the gene.

[0272] It has now been discovered that incorporation of microRNA binding sites in the sequence of synthetic RNA molecules can render the encoded protein immunotolerated. Certain embodiments are therefore directed to a synthetic RNA molecule comprising a microRNA binding site. In one embodiment, the microRNA binding site is a miR223 micro-RNA binding site. In another embodiment the microRNA binding site is a miR142 micro-RNA binding site (mIR-142 has the sequence of SEQ ID NO: 810). In some embodiments, the microRNA binding site is present in the 3′-UTR of the synthetic RNA molecule. In other embodiments, the 3′-UTR of the synthetic RNA molecule comprises multiple microRNA binding sites. In still other embodiments, the 3′-UTR of the synthetic RNA molecule comprises multiple miR142 micro-RNA binding sites. In certain embodiments, the 3′-UTR of the synthetic RNA molecule comprises multiple miR223 micro-RNA binding sites. In one embodiment, the miR142 micro-RNA binding site is TCCATAAAGTAGGAAACACTACA (SEQ ID NO: 811). In another embodiment, the 3′-UTR of the synthetic RNA molecule comprises four copies of the miR142 micro-RNA binding site (SEQ ID NO: 812). In a further embodiment, the microRNA binding sites are separated by two or more nucleotides. In one embodiment, the encoded protein is a gene-editing protein. In another embodiment, the encoded protein is expressed preferentially in non-hematopoeitic cells. In certain embodiments, the encoded protein is rendered immunotolerated. In other embodiments, the encoded protein is absent or is present at lower than normal levels in a subject. In still other embodiments, the encoded protein is a gene-editing protein, and a vector for repairing or inserting a gene is delivered to a cell. In some embodiments, the gene product is rendered immunotolerated.

[0273] Some embodiments are directed toward the provocation and/or stiulmation and/or propagation of an immune response. In some embodiments, the recombinant protein of interest is an antigen. In some embodiments, the recombinant protein of interest provides acquired immunity to one or more diseases, optionally infectious diseases. In some embodiments, the immune system mounts a response to the recombinant protein of interest. In some embodiments, the recombinant protein of interest is derived from a pathogen or toxin; in some other embodiments, the recombinant protein of interest is a synthetic mimic of a pathogen or toxin. In some embodiments, the recombinant protein of interest is a fusion protein, optionally comprising, independently, a sequence derived from or mimicking a pathogen or toxin, and/or a sequence known to stimulate immune response. In some embodiments, the subject is rendered immune or resistant to certain pathogens or toxins after administration of synthetic RNAs encoding an antigen of interest.

[0274] In various embodiments, the pathogen is coronavirus. Coronaviruses (CoVs) are members of the family Coronaviridae, including betacoronavirus and alphacoronavirus-respiratory pathogens.

[0275] In embodiments, the coronavirus protein is a betacoronavirus protein or an alphacoronavirus protein. In some embodiments, the betacoronavirus protein is selected from a SARS-CoV-2, SARS-CoV, MERS-CoV, HCoV-HKU1, and HCoV-0043 protein, or an antigenic fragment thereof. In some embodiments, the alphacoronavirus protein is selected from a HCoV-NL63 and HCoV-229E protein, or an antigenic fragment thereof.

[0276] In some embodiments, the coronavirus is a betacoronavirus or an alphacoronavirus. In some embodiments, the betacoronavirus is selected from a SARS-CoV-2, SARS-CoV, MERS-CoV, HCoV-HKU1, and HCoV-0043. In embodiments, the alphacoronavirus is selected from a HCoV-NL63 and HCoV-229E. In embodiments, the coronavirus is severe acute respiratory syndrome coronavirus 2 (SARS-CoV-2).

[0277] In some embodiments, the recombinant protein of interest is a coronavirus protein. In various embodiments, the coronavirus protein is a protein from SARS-CoV-2, such as, e.g., SARS-CoV-2 spike protein. In embodiments, the SARS-CoV-2 protein is selected from spike surface glycoprotein, membrane glycoprotein M, envelope protein E, and nucleocapsid phosphoprotein N, or an antigenic fragment thereof. In embodiments, the SARS-CoV-2 protein selected from spike surface glycoprotein comprises 51, S2 and S2′.

[0278] In some embodiments, the SARS-CoV-2 spike protein comprises the following amino acid sequence:

(SEQ ID NO: 100)
MFVFLVLLPLVSSQCVNLTTRTQLPPAYTNSFTRGVYYPDKVFRSSVLHS
TQDLFLPFFSNVTWFHAIHVSGTNGTKRFDNPVLPFNDGVYFASTEKSNI
IRGWIFGTTLDSKTQSLLIVNNATNVVIKVCEFQFCNDPFLGVYYHKNNK
SWMESEFRVYSSANNCTFEYVSQPFLMDLEGKQGNFKNLREFVFKNIDGY
FKIYSKHTPINLVRDLPQGFSALEPLVDLPIGINITRFQTLLALHRSYLT
PGDSSSGWTAGAAAYYVGYLQPRTFLLKYNENGTITDAVDCALDPLSETK
CTLKSFTVEKGIYQTSNFRVQPTESIVRFPNITNLCPFGEVFNATRFASV
YAWNRKRISNCVADYSVLYNSASFSTFKCYGVSPTKLNDLCFTNVYADSF
VIRGDEVRQIAPGQTGKIADYNYKLPDDFTGCVIAWNSNNLDSKVGGNYN
YLYRLFRKSNLKPFERDISTEIYQAGSTPCNGVEGFNCYFPLQSYGFQPT
NGVGYQPYRVVVLSFELLHAPATVCGPKKSTNLVKNKCVNFNFNGLTGTG
VLTESNKKFLPFQQFGRDIADTTDAVRDPQTLEILDITPCSFGGVSVITP
GTNTSNQVAVLYQDVNCTEVPVAIHADQLTPTWRVYSTGSNVFQTRAGCL
IGAEHVNNSYECDIPIGAGICASYQTQTNSPRRARSVASQSIIAYTMSLG
AENSVAYSNNSIAIPTNFTISVTTEILPVSMTKTSVDCTMYICGDSTECS
NLLLQYGSFCTQLNRALTGIAVEQDKNTQEVFAQVKQIYKTPPIKDFGGF
NFSQILPDPSKPSKRSFIEDLLFNKVTLADAGFIKQYGDCLGDIAARDLI
CAQKFNGLTVLPPLLTDEMIAQYTSALLAGTITSGWTFGAGAALQIPFAM
QMAYRFNGIGVTQNVLYENQKLIANQFNSAIGKIQDSLSSTASALGKLQD
VVNQNAQALNTLVKQLSSNFGAISSVLNDILSRLDKVEAEVQIDRLITGR
LQSLQTYVTQQLIRAAEIRASANLAATKMSECVLGQSKRVDFCGKGYHLM
SFPQSAPHGVVNFLHVTYVPAQEKNFTTAPAICHDGKAHFPREGVFVSNG
THWFVTQRNFYEPQIITTDNTFVSGNCDVVIGIVNNTVYDPLQPELDSFK
EELDKYFKNHTSPDVDLGDISGINASVVNIQKEIDRLNEVAKNLNESLID
LQELGKYEQYIKWPWYIWLGFIAGLIAIVMVTIMLCCMTSCCSCLKGCCS
CGSCCKFDEDDSEPVLKGVKLHYT.

[0279] In some embodiments, the envelope protein comprises the following amino acid sequence:

(SEQ ID NO: 101)
MYSFVSEETGTLIVNSVLLFLAFVVFLLVTLAILTALRLCAYCCNIVNVS
LVKPSFYVYSRVKNLNSSRVPDLLV.

[0280] In some embodiments, the membrane protein comprises the following amino acid sequence:

(SEQ ID NO: 102)
MADSNGTITVEELKKLLEQWNLVIGFLFLTWICLLQFAYANRNRFLYIIK
LIFLWLLWPVTLACFVLAAVYRINWITGGIAIAMACLVGLMWLSYFIASF
RLFARTRSMWSFNPETNILLNVPLHGTILTRPLLESELVIGAVILRGHLR
IAGHHLGRCDIKDLPKEITVATSRTLSYYKLGASQRVAGDSGFAAYSRYR
IGNYKLNTDHSSSSDNIALLVQ.

[0281] In some embodiments, the nucleocapsid phosphoprotein N comprises the following amino acid sequence:

(SEQ ID NO: 103)
MSDNGPQNQRNAPRITFGGPSDSTGSNQNGERSGARSKQRRPQGLPNNTA
SWFTALTQHGKEDLKFPRGQGVPINTNSSPDDQIGYYRRATRRIRGGDGK
MKDLSPRWYFYYLGTGPEAGLPYGANKDGIIWVATEGALNTPKDHIGTRN
PANNAAIVLQLPQGTTLPKGFYAEGSRGGSQASSRSSSRSRNSSRNSTPG
SSRGTSPARMAGNGGDAALALLLLDRLNQLESKMSGKGQQQQGQTVTKKS
AAEASKKPRQKRTATKAYNVTQAFGRRGPEQTQGNFGDQELIRQGTDYKH
WPQIAQFAPSASAFFGMSRIGMEVTPSGTWLTYTGAIKLDDKDPNFKDQV
ILLNKHIDAYKTFPPTEPKKDKKKKADETQALPQRQKKQQTVTLLPAADL
DDFSKQLQQSMSSADSTQA.

[0282] In embodiments, the spike surface glycoprotein comprises the amino acid sequence of SEQ ID NO: 100, membrane glycoprotein precursor M comprises the amino acid sequence of SEQ ID NO: 101, the envelope protein E comprises the amino acid sequence of SEQ ID NO: 102, and the nucleocapsid phosphoprotein N comprises the amino acid sequence of SEQ ID NO: 103, or an amino acid sequence at least about 90%, or at least about 95%, or at least about 97%, or at least about 98%, or at least about 99% identity with any of the foregoing, or an antigenic fragment of any of the foregoing.

[0283] In various embodiments, the SARS-CoV-2 protein may comprise an amino acid sequence that has at least about 60%, or at least about 61%, or at least about 62%, or at least about 63%, or at least about 64%, or at least about 65%, or at least about 66%, or at least about 67%, or at least about 68%, or at least about 69%, or at least about 70%, or at least about 71%, or at least about 72%, or at least about 73%, or at least about 74%, or at least about 75%, or at least about 76%, or at least about 77%, or at least about 78%, or at least about 79%, or at least about 80%, or at least about 81%, or at least about 82%, or at least about 83%, or at least about 84%, or at least about 85%, or at least about 86%, or at least about 87%, or at least about 88%, or at least about 89%, or at least about 90%, or at least about 91%, or at least about 92%, or at least about 93%, or at least about 94%, or at least about 95%, or at least about 96%, or at least about 97%, or at least about 98%, or at least about 99% sequence identity with any known wild type amino acid sequence of the SARS-CoV-2 protein or a SARS-CoV-2 amino acid sequence disclosed herein (e.g. about 60%, or about 61%, or about 62%, or about 63%, or about 64%, or about 65%, or about 66%, or about 67%, or about 68%, or about 69%, or about 70%, or about 71%, or about 72%, or about 73%, or about 74%, or about 75%, or about 76%, or about 77%, or about 78%, or about 79%, or about 80%, or about 81%, or about 82%, or about 83%, or about 84%, or about 85%, or about 86%, or about 87%, or about 88%, or about 89%, or about 90%, or about 91%, or about 92%, or about 93%, or about 94%, or about 95%, or about 96%, or about 97%, or about 98%, or about 99% sequence identity), e.g. relative to any one of SEQ ID NOs: 100, 101, 102, 103, or an antigenic fragment thereof.

[0284] In embodiments, a nucleic acid is provided that encodes a coronavirus protein, or an antigenic fragment thereof. The coronavirus protein can be any of the coronavirus proteins, including a betacoronavirus protein or an alphacoronavirus protein. The nucleic acid, without limitation, comprises RNA, such as, without limitation, mRNA. In some embodiments, the nucleic acid comprises, without limitation, DNA. The DNA can be associated with an AAV, encoding a coronavirus protein, or an antigenic fragment thereof.

[0285] In some embodiments, the nucleic acid comprises a vector that can comprise any type of nucleotides, including, but not limited to DNA and RNA, which may be single-stranded or double-stranded, synthesized or obtained in part from natural sources, and which in exemplary aspects contain natural, non-natural or altered nucleotides.

[0286] In embodiments, vaccines are provided against one or more diseases, pathogens, or toxins. In some embodiments, a vaccine in accordance with embodiments of the present disclosure generates protective antibody titers and/or T cell response to an encoded antigen. The encoded antigen can be, e.g., infections agent antigen, e.g. SARS-CoV-2 antigen. In some embodiments, a vaccine in accordance with embodiments of the present disclosure generates antigen-specific antibody titers (e.g., IgG, IgM and/or IgA) specific for an encoded antigen which can be infections agent antigen, e.g. SARS-CoV-2 antigen).

[0287] It has now been discovered that expression of certain factors along with a protein can render the encoded protein immunotolerated. In embodiments, the invention relates to the delivery of synthetic RNA molecules that are capable of inducing immunotoleration to an encoded protein by co-delivery of a factor that induces tolerance. In certain embodiments the co-delivered factors are expressed by synthetic RNA molecules. In some embodiments, a co-delivered factor is IL2 (SEQ ID NO:548). In some embodiments, a co-delivered factor is IL10 (SEQ ID NO:272 or SEQ ID NO:273) (e.g., without limitation, IL2, IL10, and/or tgf-β). In some embodiments, a co-delivered factor is TGFβ-1 (SEQ ID NO:190). In some embodiments, a co-delivered factor is TGFβ-2 (SEQ ID NO:191).

### Gene Editing

[0288] In aspects, the present invention relates to a complex of one or more synthetic RNA molecules and a compound described herein (e.g. of Formulae I-XVI), where the one or more synthetic RNA molecules include at least one RNA molecule encoding one or more gene-editing protein is selected from a nuclease, a transcription activator-like effector nuclease (TALEN), a zinc-finger nuclease, a meganuclease, a nickase, a clustered regularly interspaced short palindromic repeat (CRISPR)-associated protein, CRISPR/Cas9, Cas9, xCas9, Cas12a (Cpf1), Cas13a, Cas14, CasX, CasY, a Class 1 Cas protein, a Class 2 Cas protein, and MAD7, or a natural or engineered variant, family-member, orthologue, fragment or fusion construct thereof.

[0289] In aspects, the present invention relates to a method for gene-editing a cell, comprising transfecting the cell with a complex of one or more synthetic RNA molecules and a compound described herein (e.g. of Formulae I-XVI), where the one or more synthetic RNA molecules include at least one RNA molecule encoding one or more gene-editing protein is selected from a nuclease, a transcription activator-like effector nuclease (TALEN), a zinc-finger nuclease, a meganuclease, a nickase, a clustered regularly interspaced short palindromic repeat (CRISPR)-associated protein, CRISPR/Cas9, Cas9, xCas9, Cas12a (Cpf1), Cas13a, Cas14, CasX, CasY, a Class 1 Cas protein, a Class 2 Cas protein, and MAD7, or a natural or engineered variant, family-member, orthologue, fragment or fusion construct thereof.

[0290] Several naturally occurring proteins contain DNA-binding domains that can recognize specific DNA sequences, for example, zinc fingers (ZFs) and transcription activator-like effectors (TALEs). Fusion proteins containing one or more of these DNA-binding domains and the cleavage domain of FokI endonuclease can be used to create a double-strand break in a desired region of DNA in a cell (see, e.g., US Patent Appl. Pub. No. US 2012/0064620, US Patent Appl. Pub. No. US 2011/0239315, U.S. Pat. No. 8,470,973, US Patent Appl. Pub. No. US 2013/0217119, U.S. Pat. No. 8,420,782, US Patent Appl. Pub. No. US 2011/0301073, US Patent Appl. Pub. No. US 2011/0145940, U.S. Pat. Nos. 8,450,471, 8,440,431, 8,440,432, and US Patent Appl. Pub. No. 2013/0122581, the contents of all of which are hereby incorporated by reference). Other gene-editing proteins include clustered regularly interspaced short palindromic repeat (CRISPR)-associated proteins. However, current methods for gene editing cells are inefficient and carry a risk of uncontrolled mutagenesis, making them undesirable for research, therapeutic or cosmetic use.

[0291] Some embodiments are directed to methods of gene-editing and/or gene correction employing the present compounds (e.g. of Formulae I-XVI) and/or pharmaceutical compositions and/or lipid aggregates and/or lipid carriers. For instance, in embodiments the present compounds (e.g. of Formulae I-XVI) and/or pharmaceutical compositions and/or lipid aggregates and/or lipid carriers associate with a synthetic RNA encoding a gene-editing protein and the resultant composition is used to gene-edit and/or gene correct a cell, e.g. ex vivo or in vivo.

[0292] Some embodiments encompass synthetic RNA-based gene-editing and/or gene correction, e.g. with RNA comprising non-canonical nucleotides, e.g. RNA encoding one or more of a nuclease, a transcription activator-like effector nuclease (TALEN), a zinc-finger nuclease, a meganuclease, a nickase, a clustered regularly interspaced short palindromic repeat (CRISPR)-associated protein a DNA-repair protein, a DNA-modification protein, a base-modification protein, a DNA methyltransferase, an protein that causes DNA demethylation, an enzyme for which DNA is a substrate or a natural or engineered variant, family-member, orthologue, fragment or fusion construct thereof. In embodiments, the efficiency of the gene-editing and/or gene correction is high, for example, higher than DNA-based gene editing and/or gene correction. In embodiments, the present methods of gene-editing and/or gene correction are efficient enough for in vivo application. In embodiments, the present methods of gene-editing and/or gene correction are efficient enough to not require cellular selection (e.g. selection of cells that have been edited).

[0293] In embodiments, the efficiency of gene-editing of the present methods is about 1%, or about 2%, or about 3%, or about 4%, or about 5%, or about 6%, or about 7%, or about 8%, or about 9%, or about 10%, or about 20%, or about 30%, or about 40%, or about 50%, or about 60%, or about 70%, or about 80%, or about 90%, or about 100%. In various embodiments, the efficiency of gene-correction of the present methods is about 1%, or about 2%, or about 3%, or about 4%, or about 5%, or about 6%, or about 7%, or about 8%, or about 9%, or about 10%, or about 20%, or about 30%, or about 40%, or about 50%, or about 60%, or about 70%, or about 80%, or about 90%, or about 100%

[0294] Some embodiments are directed to high-efficiency gene-editing proteins comprising engineered nuclease cleavage or DNA-modification domains. Other embodiments are directed to high-fidelity gene-editing proteins comprising engineered nuclease cleavage or DNA-modification domains. Various embodiments are directed to high-efficiency gene-editing proteins comprising engineered DNA-binding domains. Other embodiments are directed to high-fidelity gene-editing proteins comprising engineered DNA-binding domains. Still other embodiments are directed to gene-editing proteins comprising engineered repeat sequences. Some embodiments are directed to gene-editing proteins comprising one or more CRISPR associated family members. Some embodiments are directed to methods for altering the DNA sequence of a cell by transfecting the cell with or inducing the cell to express a gene-editing protein. Other embodiments are directed to methods for altering the DNA sequence of a cell that is present in an in vitro culture. Still further embodiments are directed to methods for altering the DNA sequence of a cell that is present in vivo.

[0295] Gene-editing proteins that comprise the StsI endonuclease cleavage domain (SEQ ID NO: 1) can exhibit substantially lower off-target activity in vivo than previously disclosed gene-editing proteins, while maintaining a high level of on-target activity in vivo. Other novel engineered proteins have also been discovered that can exhibit high on-target activity in vivo, low off-target activity in vivo, small size, solubility, and other desirable characteristics when they are used as the nuclease domain of a gene-editing protein: StsI-HA (SEQ ID NO: 2), StsI-HA2 (SEQ ID NO: 3), StsI-UHA (SEQ ID NO: 4), StsI-UHA2 (SEQ ID NO: 5), StsI-HF (SEQ ID NO: 6), and StsI-UHF (SEQ ID NO: 7). StsI-HA, StsI-HA2 (high activity), StsI-UHA, and StsI-UHA2 (ultra-high activity) can exhibit higher on-target activity in vivo than both wild-type StsI and wild-type FokI, due in part to specific amino-acid substitutions within the N-terminal region at the 34 and 61 positions, while StsI-HF (high fidelity) and StsI-UHF (ultra-high fidelity) can exhibit lower off-target activity in vivo than both wild-type StsI and wild-type FokI, due in part to specific amino-acid substitutions within the C-terminal region at the 141 and 152 positions.

[0296] Certain embodiments are therefore directed to a protein. In embodiments, the protein is present in vivo. In other embodiments, the protein comprises a nuclease domain. In one embodiment, the nuclease domain comprises one or more of the cleavage domain of FokI endonuclease (SEQ ID NO: 53), the cleavage domain of StsI endonuclease (SEQ ID NO: 1), StsI-HA (SEQ ID NO: 2), StsI-HA2 (SEQ ID NO: 3), StsI-UHA (SEQ ID NO: 4), StsI-UHA2 (SEQ ID NO: 5), StsI-HF (SEQ ID NO: 6), and StsI-UHF (SEQ ID NO: 7) or a biologically active fragment or variant thereof.

[0297] Engineered gene-editing proteins that comprise DNA-binding domains comprising certain novel repeat sequences can exhibit lower off-target activity in vivo than previously disclosed gene-editing proteins, while maintaining a high level of on-target activity in vivo. Certain of these engineered gene-editing proteins can provide several advantages over previously disclosed gene-editing proteins, including, for example, increased flexibility of the linker region connecting repeat sequences, which can result in increased binding efficiency. Certain embodiments are therefore directed to a protein comprising a plurality of repeat sequences. In one embodiment, at least one of the repeat sequences contains the amino-acid sequence: GabG, where “a” and “b” each represent any amino acid. In one embodiment, the protein is a gene-editing protein. In another embodiment, one or more of the repeat sequences are present in a DNA-binding domain. In a further embodiment, “a” and “b” are each independently selected from the group: H and G. In a still further embodiment, “a” and “b” are H and G, respectively. In one embodiment, the amino-acid sequence is present within about 5 amino acids of the C-terminus of the repeat sequence. In another embodiment, the amino-acid sequence is present at the C-terminus of the repeat sequence. In embodiments, one or more G in the amino-acid sequence GabG is replaced with one or more amino acids other than G, for example A, H or GG. In one embodiment, the repeat sequence has a length of between about 32 and about 40 amino acids or between about 33 and about 39 amino acids or between about 34 and 38 amino acids or between about 35 and about 37 amino acids or about 36 amino acids or greater than about 32 amino acids or greater than about 33 amino acids or greater than about 34 amino acids or greater than about 35 amino acids. Other embodiments are directed to a protein comprising one or more transcription activator-like effector domains. In one embodiment, at least one of the transcription activator-like effector domains comprises a repeat sequence. Other embodiments are directed to a protein comprising a plurality of repeat sequences generated by inserting one or more amino acids between at least two of the repeat sequences of a transcription activator-like effector domain. In one embodiment, one or more amino acids is inserted about 1 or about 2 or about 3 or about 4 or about 5 amino acids from the C-terminus of at least one repeat sequence. Still other embodiments are directed to a protein comprising a plurality of repeat sequences, wherein about every other repeat sequence has a different length than the repeat sequence immediately preceding or following the repeat sequence. In one embodiment, every other repeat sequence is about 36 amino acids long. In another embodiment, every other repeat sequence is 36 amino acids long. Still other embodiments are directed to a protein comprising a plurality of repeat sequences, wherein the plurality of repeat sequences comprises at least two repeat sequences that are each at least 36 amino acids long, and wherein at least two of the repeat sequences that are at least 36 amino acids long are separated by at least one repeat sequence that is less than 36 amino acids long. Some embodiments are directed to a protein that comprises one or more sequences selected from, for example, SEQ ID NO: 54, SEQ ID NO: 55, SEQ ID NO: 56, SEQ ID NO: 57, SEQ ID NO: 58, SEQ ID NO: 59, and SEQ ID NO: 60.

[0298] Other embodiments are directed to a protein that comprises a DNA-binding domain. In embodiments, the DNA-binding domain comprises a plurality of repeat sequences. In one embodiment, the plurality of repeat sequences enables high-specificity recognition of a binding site in a target DNA molecule. In another embodiment, at least two of the repeat sequences have at least about 50%, or about 60%, or about 70%, or about 80%, or about 90%, or about 95%, or about 98%, or about 99% homology to each other. In a further embodiment, at least one of the repeat sequences comprises one or more regions capable of binding to a binding site in a target DNA molecule. In a still further embodiment, the binding site comprises a defined sequence of between about 1 to about 5 bases in length. In one embodiment, the DNA-binding domain comprises a zinc finger. In another embodiment, the DNA-binding domain comprises a transcription activator-like effector (TALE). In a further embodiment, the plurality of repeat sequences includes at least one repeat sequence having at least about 50% or about 60% or about 70% or about 80% or about 90% or about 95% or about 98%, or about 99% homology to a TALE. In a still further embodiment, the gene-editing protein comprises a clustered regularly interspaced short palindromic repeat (CRISPR)-associated protein. In one embodiment, the gene-editing protein comprises a nuclear-localization sequence. In another embodiment, the nuclear-localization sequence comprises the amino-acid sequence: PKKKRKV (SEQ ID NO: 471). In one embodiment, the gene-editing protein comprises a mitochondrial-localization sequence. In another embodiment, the mitochondrial-localization sequence comprises the amino-acid sequence: LGRVIPRKIASRASLM (SEQ ID NO: 472). In one embodiment, the gene-editing protein comprises a linker. In another embodiment, the linker connects a DNA-binding domain to a nuclease domain. In a further embodiment, the linker is between about 1 and about 10 amino acids long. In embodiments, the linker is about 1, about 2, or about 3, or about 4, or about 5, or about 6, or about 7, or about 8, or about 9, or about 10 amino acids long. In one embodiment, the gene-editing protein is capable of generating a nick or a double-strand break in a target DNA molecule.

[0299] In embodiments, gene-editing protein comprises: (a) a DNA-binding domain comprising a plurality of repeat sequences and at least one of the repeat sequences comprises the amino acid sequence: LTPvQVVAIAwxyzGHGG (SEQ ID NO: 629), where “v” is Q, D or E, “w” is S or N, “x” is H, N, or I, “y” is D, A, I, N, G, H, K, S, or null, and “z” is GGKQALETVQRLLPVLCQD (SEQ ID NO: 630) or GGKQALETVQRLLPVLCQA (SEQ ID NO: 631); and, optionally, (b) a nuclease domain comprising a catalytic domain of a nuclease. In embodiments, the nuclease domain is capable of forming a dimer with another nuclease domain. In embodiments, the nuclease domain comprises the catalytic domain of a protein comprising the amino acid sequence of SEQ ID NO: 632. In embodiments, at least one of the repeat sequences comprising the amino acid sequence LTPvQVVAIAwxyzGHGG (SEQ ID NO: 629) is between 36 and 39 amino acids long.

[0300] Certain embodiments are directed to a method for modifying the genome of a cell in vivo, the method comprising introducing into a cell in vivo a nucleic acid molecule encoding a non-naturally occurring fusion protein comprising an artificial transcription activator-like (TAL) effector repeat domain comprising one or more repeat units 36 amino acids in length and an endonuclease domain, wherein the repeat domain is engineered for recognition of a predetermined nucleotide sequence, and wherein the fusion protein recognizes the predetermined nucleotide sequence. In one embodiment, the cell is a eukaryotic cell. In another embodiment, the cell is an animal cell. In a further embodiment, the cell is a mammalian cell. In a still further embodiment, the cell is a human cell. In one embodiment, the cell is a plant cell. In another embodiment, the cell is a prokaryotic cell. In embodiments, the fusion protein introduces an endonucleolytic cleavage in a nucleic acid of the cell, whereby the genome of the cell is modified.

[0301] Certain embodiments are directed to a composition for altering the DNA sequence of a cell in vivo comprising a nucleic acid, wherein the nucleic acid encodes a gene-editing protein. Other embodiments are directed to a composition for altering the DNA sequence of a cell in vivo comprising a nucleic-acid mixture, wherein the nucleic-acid mixture comprises: a first nucleic acid that encodes a first gene-editing protein, and a second nucleic acid that encodes a second gene-editing protein. In one embodiment, the binding site of the first gene-editing protein and the binding site of the second gene-editing protein are present in the same target DNA molecule. In another embodiment, the binding site of the first gene-editing protein and the binding site of the second gene-editing protein are separated by less than about 50 bases, or less than about 40 bases, or less than about 30 bases or less than about 20 bases, or less than about 10 bases, or between about 10 bases and about 25 bases or about 15 bases. In one embodiment, the nuclease domain of the first gene-editing protein and the nuclease domain of the second gene-editing protein are capable of forming a dimer. In another embodiment, the dimer is capable of generating a nick or double-strand break in a target DNA molecule.

[0302] Certain embodiments are directed to a therapeutic composition. Other embodiments are directed to a cosmetic composition. In embodiments, the composition comprises a repair template. In a further embodiment, the repair template is a single-stranded DNA molecule or a double-stranded DNA molecule.

[0303] Other embodiments are directed to an article of manufacture for synthesizing a protein or a nucleic acid encoding a protein. In one embodiment, the article is a nucleic acid. In another embodiment, the protein comprises a DNA-binding domain. In a further embodiment, the nucleic acid comprises a nucleotide sequence encoding a DNA-binding domain. In one embodiment, the protein comprises a nuclease domain. In another embodiment, the nucleic acid comprises a nucleotide sequence encoding a nuclease domain. In one embodiment, the protein comprises a plurality of repeat sequences. In another embodiment, the nucleic acid encodes a plurality of repeat sequences. In a further embodiment, the nuclease domain is selected from FokI, StsI, StsI-HA, StsI-HA2, StsI-UHA, StsI-UHA2, StsI-HF, and StsI-UHF or a natural or engineered variant or biologically active fragment thereof. In one embodiment, the nucleic acid comprises an RNA-polymerase promoter. In another embodiment, the RNA-polymerase promoter is a T7 promoter or a SP6 promoter. In a further embodiment, the nucleic acid comprises a viral promoter. In one embodiment, the nucleic acid comprises an untranslated region. In another embodiment, the nucleic acid is an in vitro-transcription template.

[0304] Certain embodiments are directed to a method for inducing a cell to express a protein in vivo. Other embodiments are directed to a method for altering the DNA sequence of a cell in vivo comprising transfecting the cell in vivo with a gene-editing protein or inducing the cell to express a gene-editing protein in vivo. Still other embodiments are directed to a method for reducing the expression of a protein of interest in a cell in vivo. In one embodiment, the cell is induced to express a gene-editing protein, wherein the gene-editing protein is capable of creating a nick or a double-strand break in a target DNA molecule. In another embodiment, the nick or double-strand break results in inactivation of a gene. Still other embodiments are directed to a method for generating an inactive, reduced-activity or dominant-negative form of a protein in vivo. In one embodiment, the protein is survivin. Still other embodiments are directed to a method for repairing one or more mutations in a cell in vivo. In one embodiment, the cell is contacted with a repair template. In another embodiment, the repair template is a DNA molecule. In a further embodiment, the repair template does not contain a binding site of the gene-editing protein. In a still further embodiment, the repair template encodes an amino-acid sequence that is encoded by a DNA sequence that comprises a binding site of the gene-editing protein.

[0305] In various embodiments, the repair template is about 20 nucleotides, or about 30 nucleotides, or about 40 nucleotides, or about 50 nucleotides, or about 60 nucleotides, or about 70 nucleotides, or about 80 nucleotides, or about 90 nucleotides, or about 100 nucleotides, or about 150 nucleotides, or about 200 nucleotides, or about 300 nucleotides, or about 400 nucleotides, or about 500 nucleotides, or about 750 nucleotides, or about 1000 nucleotides. In various embodiments, the repair template is about 20-1000 nucleotides, or about 20-500 nucleotides, or about 20-400 nucleotides, or about 20-200 nucleotides, or about 20-100 nucleotides, or about 80-100 nucleotides, or about 50-100 nucleotides.

[0306] In various embodiments, the mass ratio of RNA (e.g. synthetic RNA encoding gene-editing protein) to repair template is about 1:10, or about 1:9, or about 1:8, or about 1:7, or about 1:6, or about 1:5, or about 1:4, or about 1:3, or about 1:2, or about 1:1, or about 2:1, or about 3:1, or about 4:1, or about 5:1, or about 6:1, or about 7:1, or about 8:1, or about 9:1, or about 10:1.

[0307] In various embodiments, the molar ratio of RNA (e.g. synthetic RNA encoding gene-editing protein) to repair template is about 1:10, or about 1:9, or about 1:8, or about 1:7, or about 1:6, or about 1:5, or about 1:4, or about 1:3, or about 1:2, or about 1:1, or about 2:1, or about 3:1, or about 4:1, or about 5:1, or about 6:1, or about 7:1, or about 8:1, or about 9:1, or about 10:1.

[0308] In various embodiments, the repair template has a dual function, causing a repair to a gene-edited target sequence and preventing further binding of a gene-editing protein, thereby reducing or eliminating further gene-editing (e.g. via the repair template causing a repair that renders what was the gene-editing protein binding site no longer suitable for gene-editing protein binding). Accordingly, in some embodiments, the present gene-editing methods are tunable to ensure a single gene-edit per target site.

### Reprogramming

[0309] In aspects, the present invention relates to a method for reprogramming a differentiated cell to a less differentiated state, comprising (a) providing a differentiated or non-pluripotent cell; (b) culturing the differentiated cell or non-pluripotent; and (c) transfecting the differentiated cell or non-pluripotent with a complex of one or more synthetic RNA molecules and a compound described herein (e.g. of Formulae I-XVI), where the one or more synthetic RNA molecules include at least one RNA molecule encoding one or more reprogramming factors and where the transfecting results in the cell expressing the one or more reprogramming factors, to result in the cell being reprogrammed to a less differentiated state. In embodiments, step (c) occurs in the presence of a medium containing ingredients that support reprogramming of the differentiated cell to a less differentiated state. In embodiments, the further comprises repeating step (c) at least twice during 5 consecutive days. In embodiments, the amount of one or more synthetic RNA molecules transfected in one or more later transfections is greater than the amount transfected in one or more earlier transfections. In embodiments, steps (a)-(c) are performed without using feeder cells and occur in the presence of a feeder cell conditioned medium. In embodiments, step (c) is performed without using irradiated human neonatal fibroblast feeder cells and occurs in the presence of a feeder cell conditioned medium. In embodiments, the synthetic RNA molecule encodes one or more reprogramming factor(s) selected from Oct4, Sox2, Klf4, c-Myc, I-Myc, Tert, Nanog, Lin28, Utf1, Aicda, miR200 micro-RNA, miR302 micro-RNA, miR367 micro-RNA, miR369 micro-RNA and biologically active fragments, analogues, variants and family-members thereof.

[0310] In embodiments, the differentiated or non-pluripotent cell is derived from a biopsy. In embodiments, the differentiated or non-pluripotent cell is from a human subject. In embodiments, the differentiated or non-pluripotent cell is derived from a dermal punch biopsy sample. In embodiments, differentiated or non-pluripotent cell is a keratinocyte, fibroblast, or PBMC.

[0311] In embodiments, the method for reprogramming further comprising contacting the cell with at least one member of the group: poly-L-lysine, poly-L-ornithine, RGD peptide, fibronectin, vitronectin, collagen, and laminin.

[0312] In embodiments, the method for reprogramming uses a medium which is substantially free of immunosuppressants.

[0313] Cells can be reprogrammed by exposing them to specific extracellular cues and/or by ectopic expression of specific proteins, microRNAs, etc. While several reprogramming methods have been previously described, most that rely on ectopic expression require the introduction of exogenous DNA, which can carry mutation risks. DNA-free reprogramming methods based on direct delivery of reprogramming proteins have been reported. However, these methods are too inefficient and unreliable for commercial use. In addition, RNA-based reprogramming methods have been described (see, e.g., Angel. MIT Thesis. 2008. 1-56; Angel et al. PLoS ONE. 2010. 5,107; Warren et al. Cell Stem Cell. 2010. 7,618-630; Angel. MIT Thesis. 2011. 1-89; and Lee et al., Cell. 2012. 151,547-558; the contents of all of which are hereby incorporated by reference). However, existing RNA-based reprogramming methods are slow, unreliable, and inefficient when performed on adult cells, require many transfections (resulting in significant expense and opportunity for error), can reprogram only a limited number of cell types, can reprogram cells to only a limited number of cell types, require the use of immunosuppressants, and require the use of multiple human-derived components, including blood-derived HSA and human fibroblast feeders. The many drawbacks of previously disclosed RNA-based reprogramming methods make them undesirable for research, therapeutic or cosmetic use.

[0314] Reprogramming can be performed by transfecting cells with one or more nucleic acids encoding one or more reprogramming factors. Examples of reprogramming factors include, but are not limited to Oct4 protein, Sox2 protein, Klf4 protein, c-Myc protein, I-Myc protein, TERT protein, Nanog protein, Lin28 protein, Utf1 protein, Aicda protein, miR200 micro-RNA, miR302 micro-RNA, miR367 micro-RNA, miR369 micro-RNA and biologically active fragments, analogues, variants and family-members thereof. Certain embodiments are therefore directed to a method for reprogramming a cell in vivo. In one embodiment, the cell in vivo is reprogrammed by transfecting the cell with one or more nucleic acids encoding one or more reprogramming factors. In one embodiment, the one or more nucleic acids includes an RNA molecule that encodes Oct4 protein. In another embodiment, the one or more nucleic acids also includes one or more RNA molecules that encodes Sox2 protein, Klf4 protein, and c-Myc protein. In yet another embodiment, the one or more nucleic acids also includes an RNA molecule that encodes Lin28 protein. In one embodiment, the cell is a human skin cell, and the human skin cell is reprogrammed to a pluripotent stem cell. In another embodiment, the cell is a human skin cell, and the human skin cell is reprogrammed to a glucose-responsive insulin-producing cell. Examples of other cells that can be reprogrammed and other cells to which a cell can be reprogrammed include, but are not limited to skin cells, pluripotent stem cells, mesenchymal stem cells, β-cells, retinal pigmented epithelial cells, hematopoietic cells, cardiac cells, airway epithelial cells, neural stem cells, neurons, glial cells, bone cells, blood cells, and dental pulp stem cells. In one embodiment, the cell is contacted with a medium that supports the reprogrammed cell. In one embodiment, the medium also supports the cell.

[0315] Importantly, infecting skin cells with viruses encoding Oct4, Sox2, Klf4, and c-Myc, combined with culturing the cells in a medium that supports the growth of cardiomyocytes, has been reported to cause reprogramming of the skin cells to cardiomyocytes, without first reprogramming the skin cells to pluripotent stem cells (See Efs et al., Nat Cell Biol. 2011; 13:215-22, the contents of which are hereby incorporated by reference). In certain situations, direct reprogramming (reprogramming one somatic cell to another somatic cell without first reprogramming the somatic cell to a pluripotent stem cell, also known as “transdifferentiation”) may be desirable, in part because culturing pluripotent stem cells can be time-consuming and expensive, the additional handling involved in establishing and characterizing a stable pluripotent stem cell line can carry an increased risk of contamination, and the additional time in culture associated with first producing pluripotent stem cells can carry an increased risk of genomic instability and the acquisition of mutations, including point mutations, copy-number variations, and karyotypic abnormalities. Certain embodiments are therefore directed to a method for reprogramming a somatic cell in vivo, wherein the cell is reprogrammed to a somatic cell, and wherein a characterized pluripotent stem-cell line is not produced.

[0316] In certain situations, fewer total transfections may be required to reprogram a cell according to the methods of the present invention than according to other methods. Certain embodiments are therefore directed to a method for reprogramming a cell in vivo, wherein between about 1 and about 12 transfections are performed during about 20 consecutive days, or between about 4 and about 10 transfections are performed during about 15 consecutive days, or between about 4 and about 8 transfections are performed during about 10 consecutive days. It is recognized that when a cell is contacted with a medium containing nucleic acid molecules, the cell may likely come into contact with and/or internalize more than one nucleic acid molecule either simultaneously or at different times. A cell can therefore be contacted with a nucleic acid more than once, e.g. repeatedly, even when a cell is contacted only once with a medium containing nucleic acids.

[0317] Of note, nucleic acids can contain one or more non-canonical or “modified” residues as described herein. For instance, any of the non-canonical nucleotides described herein can be used in the present reprogramming methods. In one embodiment, pseudouridine-5′-triphosphate can be substituted for uridine-5′-triphosphate in an in vitro-transcription reaction to yield synthetic RNA, wherein up to 100% of the uridine residues of the synthetic RNA may be replaced with pseudouridine residues. In vitro-transcription can yield RNA with residual immunogenicity, even when pseudouridine and 5-methylcytidine are completely substituted for uridine and cytidine, respectively (see, e.g., Angel. Reprogramming Human Somatic Cells to Pluripotency Using RNA [Doctoral Thesis]. Cambridge, Mass.: MIT; 2011, the contents of which are hereby incorporated by reference). For this reason, it is common to add an immunosuppressant to the transfection medium when transfecting cells with RNA. In certain situations, adding an immunosuppressant to the transfection medium may not be desirable, in part because the recombinant immunosuppressant most commonly used for this purpose, B18R, can be expensive and difficult to manufacture.

[0318] Cells, in vivo can be transfected and/or reprogrammed according to the methods of the present invention, without using B18R or any other immunosuppressant. Reprogramming cells in vivo according to the methods of the present invention without using immunosuppressants can be rapid, efficient, and reliable. Certain embodiments are therefore directed to a method for transfecting a cell in vivo, wherein the transfection medium does not contain an immunosuppressant. Other embodiments are directed to a method for reprogramming a cell in vivo, wherein the transfection medium does not contain an immunosuppressant. In certain situations, for example when using a high cell density, it may be beneficial to add an immunosuppressant to the transfection medium. Certain embodiments are therefore directed to a method for transfecting a cell in vivo, wherein the transfection medium contains an immunosuppressant. Other embodiments are directed to a method for reprogramming a cell in vivo, wherein the transfection medium contains an immunosuppressant. In one embodiment, the immunosuppressant is B18R or a biologically active fragment, analogue, variant or family-member thereof or dexamethasone or a derivative thereof. In one embodiment, the transfection medium does not contain an immunosuppressant, and the nucleic-acid dose is chosen to prevent excessive toxicity. In another embodiment, the nucleic-acid dose is less than about 1 mg/cm² of tissue or less than about 1 mg/100,000 cells or less than about 10 mg/kg.

[0319] Reprogrammed cells produced according to certain embodiments of the present invention are suitable for therapeutic and/or cosmetic applications as they do not contain undesirable exogenous DNA sequences, and they are not exposed to animal-derived or human-derived products, which may be undefined, and which may contain toxic and/or pathogenic contaminants. Furthermore, the high speed, efficiency, and reliability of certain embodiments of the present invention may reduce the risk of acquisition and accumulation of mutations and other chromosomal abnormalities. Certain embodiments of the present invention can thus be used to generate cells that have a safety profile adequate for use in therapeutic and/or cosmetic applications. For example, reprogramming cells using RNA and the medium of the present invention, wherein the medium does not contain animal or human-derived components, can yield cells that have not been exposed to allogeneic material. Certain embodiments are therefore directed to a reprogrammed cell that has a desirable safety profile. In one embodiment, the reprogrammed cell has a normal karyotype. In another embodiment, the reprogrammed cell has fewer than about 5 copy-number variations (CNVs) relative to the patient genome, such as fewer than about 3 copy-number variations relative to the patient genome, or no copy-number variations relative to the patient genome. In yet another embodiment, the reprogrammed cell has a normal karyotype and fewer than about 100 single nucleotide variants in coding regions relative to the patient genome, or fewer than about 50 single nucleotide variants in coding regions relative to the patient genome, or fewer than about 10 single nucleotide variants in coding regions relative to the patient genome.

[0320] Endotoxins and nucleases can co-purify and/or become associated with other proteins, such as serum albumin. Recombinant proteins, in particular, can often have high levels of associated endotoxins and nucleases, due in part to the lysis of cells that can take place during their production. Endotoxins and nucleases can be reduced, removed, replaced or otherwise inactivated by many of the methods of the present invention, including, for example, by acetylation, by addition of a stabilizer such as sodium octanoate, followed by heat treatment, by the addition of nuclease inhibitors to the albumin solution and/or medium, by crystallization, by contacting with one or more ion-exchange resins, by contacting with charcoal, by preparative electrophoresis or by affinity chromatography. Partially or completely reducing, removing, replacing, or otherwise inactivating endotoxins and/or nucleases from a medium and/or from one or more components of a medium can increase the efficiency with which cells can be transfected and reprogrammed. Certain embodiments are therefore directed to a method for transfecting a cell in vivo with one or more nucleic acids, wherein the transfection medium is treated to partially or completely reduce, remove, replace or otherwise inactivate one or more endotoxins and/or nucleases. Other embodiments are directed to a medium that causes minimal degradation of nucleic acids. In one embodiment, the medium contains less than about 1 EU/mL, or less than about 0.1 EU/mL, or less than about 0.01 EU/mL.

[0321] In certain situations, protein-based lipid carriers such as serum albumin can be replaced with non-protein-based lipid carriers such as methyl-beta-cyclodextrin. The medium of the present invention can also be used without a lipid carrier, for example, when transfection is performed using a method that may not require or may not benefit from the presence of a lipid carrier, for example, using one or more lipid-based transfection reagents, polymer-based transfection reagents or peptide-based transfection reagents or using electroporation. Many protein-associated molecules, such as metals, can be highly toxic to cells in vivo. This toxicity can cause decreased viability, as well as the acquisition of mutations. Certain embodiments thus have the additional benefit of producing cells that are free from toxic molecules.

[0322] The associated-molecule component of a protein can be measured by suspending the protein in solution and measuring the conductivity of the solution. Certain embodiments are therefore directed to a medium that contains a protein, wherein about a 10% solution of the protein in water has a conductivity of less than about 500 pmho/cm.

[0323] In one embodiment, the solution has a conductivity of less than about 50 pmho/cm. In another embodiment, less than about 0.65% of the dry weight of the protein comprises lipids and/or less than about 0.35% of the dry weight of the protein comprises free fatty acids.

[0324] The amount of nucleic acid delivered to cells in vivo can be increased to increase the desired effect of the nucleic acid. However, increasing the amount of nucleic acid delivered to cells in vivo beyond a certain point can cause a decrease in the viability of the cells, due in part to toxicity of the transfection reagent. When a nucleic acid is delivered to a population of cells in vivo in a fixed volume (for example, cells in a region of tissue), the amount of nucleic acid delivered to each cell can depend on the total amount of nucleic acid delivered to the population of cells and to the density of the cells, with a higher cell density resulting in less nucleic acid being delivered to each cell. In certain embodiments, a cell in vivo is transfected with one or more nucleic acids more than once. Under certain conditions, for example when the cells are proliferating, the cell density may change from one transfection to the next. Certain embodiments are therefore directed to a method for transfecting a cell in vivo with a nucleic acid, wherein the cell is transfected more than once, and wherein the amount of nucleic acid delivered to the cell is different for two of the transfections. In one embodiment, the cell proliferates between two of the transfections, and the amount of nucleic acid delivered to the cell is greater for the second of the two transfections than for the first of the two transfections. In another embodiment, the cell is transfected more than twice, and the amount of nucleic acid delivered to the cell is greater for the second of three transfections than for the first of the same three transfections, and the amount of nucleic acid delivered to the cells is greater for the third of the same three transfections than for the second of the same three transfections. In yet another embodiment, the cell is transfected more than once, and the maximum amount of nucleic acid delivered to the cell during each transfection is sufficiently low to yield at least about 80% viability for at least two consecutive transfections.

[0325] Modulating the amount of nucleic acid delivered to a population of proliferating cells in vivo in a series of transfections can result in both an increased effect of the nucleic acid and increased viability of the cells. In certain situations, when cells in vivo are contacted with one or more nucleic acids encoding one or more reprogramming factors in a series of transfections, the efficiency of reprogramming can be increased when the amount of nucleic acid delivered in later transfections is greater than the amount of nucleic acid delivered in earlier transfections, for at least part of the series of transfections. Certain embodiments are therefore directed to a method for reprogramming a cell in vivo, wherein one or more nucleic acids is repeatedly delivered to the cell in a series of transfections, and the amount of the nucleic acid delivered to the cell is greater for at least one later transfection than for at least one earlier transfection. In one embodiment, the cell is transfected between about 2 and about 10 times, or between about 3 and about 8 times, or between about 4 and about 6 times. In another embodiment, the one or more nucleic acids includes at least one RNA molecule, the cell is transfected between about 2 and about 10 times, and the amount of nucleic acid delivered to the cell in each transfection is the same as or greater than the amount of nucleic acid delivered to the cell in the most recent previous transfection. In yet another embodiment, the amount of nucleic acid delivered to the cell in the first transfection is between about 20 ng/cm² and about 250 ng/cm², or between 100 ng/cm² and 600 ng/cm². In yet another embodiment, the cell is transfected about 5 times at intervals of between about 12 and about 48 hours, and the amount of nucleic acid delivered to the cell is about 25 ng/cm² for the first transfection, about 50 ng/cm² for the second transfection, about 100 ng/cm² for the third transfection, about 200 ng/cm² for the fourth transfection, and about 400 ng/cm² for the fifth transfection. In yet another embodiment, the cell is further transfected at least once after the fifth transfection, and the amount of nucleic acid delivered to the cell is about 400 ng/cm².

[0326] Certain embodiments are directed to a method for transfecting a cell in vivo with a nucleic acid, wherein the amount of nucleic acid is determined by measuring the cell density, and choosing the amount of nucleic acid to transfect based on the measurement of cell density. In one embodiment, the cell density is measured by optical means. In another embodiment, the cell is transfected repeatedly, the cell density increases between two transfections, and the amount of nucleic acid transfected is greater for the second of the two transfections than for the first of the two transfections.

[0327] The amount of a circulating protein that is produced in a patient can be increased by administering to a patient a nucleic acid at a plurality of administration sites. In certain embodiments, the amount of a circulating protein is increased relative to the amount of the circulating protein that is produced in a patient by administering to the patient the nucleic acid at a single injection site. In one embodiment, the administering is by injection. In another embodiment, the injection is intradermal injection. In still another embodiment, the injection is subcutaneous or intramuscular injection. In embodiments, the plurality of administration sites comprises administration sites in the skin. In other embodiments, the plurality of administration sites is at least about 1 or at least about 2 or at least about 5 or at least about 10 or at least about 20 or at least about 50 or at least about 100 administration sites. In one embodiment, the administering is performed within at least about 5 minutes or at least about 10 minutes or at least about 30 minutes or at least about 1 hour or at least about 2 hours or at least about 5 hours or at least about 12 hours or at least about 1 day. In certain embodiments, the amount of a circulating protein is increased by at least about 10 percent or at least about 20 percent or at least about 50 percent or at least about 100 percent or at least about 3-fold or at least about 5-fold or at least about 10-fold or at least about 20-fold or at least about 50-fold or at least about 100-fold or at least about 500-fold or at least about 1000-fold or greater than 1000-fold.

[0328] In certain situations, the in vivo transfection efficiency and viability of cells contacted with the medium of the present invention can be improved by conditioning the medium. Certain embodiments are therefore directed to a method for conditioning a medium. Other embodiments are directed to a medium that is conditioned. In one embodiment, the feeders are fibroblasts, and the medium is conditioned for approximately 24 hours. Other embodiments are directed to a method for transfecting a cell in vivo, wherein the transfection medium is conditioned. Other embodiments are directed to a method for reprogramming and/or gene-editing a cell in vivo, wherein the medium is conditioned. In one embodiment, the feeders are mitotically inactivated, for example, by exposure to a chemical such as mitomycin-C or by exposure to gamma radiation. In certain embodiments, it may be beneficial to use only autologous materials, in part to, for example and not wishing to be bound by theory, avoid the risk of disease transmission from the feeders to the cell or the patient. Certain embodiments are therefore directed to a method for transfecting a cell in vivo, wherein the transfection medium is conditioned, and wherein the feeders are derived from the same individual as the cell being transfected. Other embodiments are directed to a method for reprogramming and/or gene-editing a cell in vivo, wherein the medium is conditioned, and wherein the feeders are derived from the same individual as the cell being reprogrammed and/or gene-edited.

[0329] Several molecules can be added to media by conditioning. Certain embodiments are therefore directed to a medium that is supplemented with one or more molecules that are present in a conditioned medium. In one embodiment, the medium is supplemented with Wnt1, Wnt2, Wnt3, Wnt3a or a biologically active fragment, analogue, variant, agonist, or family-member thereof. In another embodiment, the medium is supplemented with TGF-β or a biologically active fragment, analogue, variant, agonist, or family-member thereof. In yet another embodiment, a cell in vivo is reprogrammed according to the method of the present invention, wherein the medium is not supplemented with TGF-β for between about 1 and about 5 days, and is then supplemented with TGF-β for at least about 2 days. In yet another embodiment, the medium is supplemented with IL-6, IL-6R or a biologically active fragment, analogue, variant, agonist, or family-member thereof. In yet another embodiment, the medium is supplemented with a sphingolipid or a fatty acid. In still another embodiment, the sphingolipid is lysophosphatidic acid, lysosphingomyelin, sphingosine-1-phosphate or a biologically active analogue, variant or derivative thereof.

[0330] In addition to mitotically inactivating cells, under certain conditions, irradiation can change the gene expression of cells, causing cells to produce less of certain proteins and more of certain other proteins that non-irradiated cells, for example, members of the Wnt family of proteins. In addition, certain members of the Wnt family of proteins can promote the growth and transformation of cells. In certain situations, the efficiency of reprogramming can be greatly increased by contacting a cell in vivo with a medium that is conditioned using irradiated feeders instead of mitomycin-c-treated feeders. The increase in reprogramming efficiency observed when using irradiated feeders is caused in part by Wnt proteins that are secreted by the feeders. Certain embodiments are therefore directed to a method for reprogramming a cell in vivo, wherein the cell is contacted with Wnt1, Wnt2, Wnt3, Wnt3a or a biologically active fragment, analogue, variant, family-member or agonist thereof, including agonists of downstream targets of Wnt proteins, and/or agents that mimic one or more of the biological effects of Wnt proteins, for example, 2-amino-4-[3,4-(methylenedioxy)benzylamino]-6-(3-methoxyphenyl)pyrimidine.

[0331] Because of the low efficiency of many DNA-based reprogramming methods, these methods may be difficult or impossible to use with cells derived from patient samples, which may contain only a small number of cells. In contrast, the high efficiency of certain embodiments of the present invention can allow reliable reprogramming of a small number of cells, including single cells. Certain embodiments are directed to a method for reprogramming a small number of cells. Other embodiments are directed to a method for reprogramming a single cell. In one embodiment, the cell is contacted with one or more enzymes. In another embodiment, the enzyme is collagenase.

[0332] In yet another embodiment, the collagenase is animal-component free. In one embodiment, the collagenase is present at a concentration of between about 0.1 mg/mL and about 10 mg/mL, or between about 0.5 mg/mL and about 5 mg/mL. In another embodiment, the cell is a blood cell. In yet another embodiment, the cell is contacted with a medium containing one or more proteins that is derived from the patient's blood. In still another embodiment, the cell is contacted with a medium comprising: DMEM/F12+2 mM L-alanyl-L-glutamine+between about 5% and about 25% patient-derived serum, or between about 10% and about 20% patient-derived serum, or about 20% patient-derived serum.

[0333] In certain situations, transfecting cells in vivo with a mixture of RNA encoding Oct4, Sox2, Klf4, and c-Myc using the medium of the present invention can cause the rate of proliferation of the cells to increase. When the amount of RNA delivered to the cells is too low to ensure that all of the cells are transfected, only a fraction of the cells may show an increased proliferation rate. In certain situations, such as when generating a personalized therapeutic, increasing the proliferation rate of cells may be desirable, in part because doing so can reduce the time necessary to generate therapeutic, and therefore can reduce the cost of therapeutic. Certain embodiments are therefore directed to a method for transfecting a cell in vivo with a mixture of RNA encoding Oct4, Sox2, Klf4, and c-Myc. In one embodiment, the cell exhibits an increased proliferation rate. In another embodiment, the cell is reprogrammed.

[0334] Methods for simultaneous or sequential gene editing and reprogramming of somatic cells as described herein, are also provided.

### Methods of Treatment

[0335] In embodiments, the present invention relates to method of treatment of a disease or disorder by delivering a therapeutic agent with the present compounds (e.g. of Formulae I-XVI) and/or pharmaceutical compositions and/or lipid aggregates and/or lipid carriers.

[0336] In embodiments, the present invention relates to method of treatment of a disease or disorder by delivering a nucleic acid therapeutic agent with the present compounds (e.g. of Formulae I-XVI) and/or pharmaceutical compositions and/or lipid aggregates and/or lipid carriers.

[0337] In embodiments, the present invention relates to method of treatment of a disease or disorder by delivering an RNA, e.g. synthetic RNA, therapeutic agent with the present compounds (e.g. of Formulae I-XVI) and/or pharmaceutical compositions and/or lipid aggregates and/or lipid carriers.

[0338] In embodiments, the present invention relates to method of treatment of a disease or disorder by delivering a therapeutic agent, e.g. nucleic acid, e.g. RNA, e.g. synthetic RNA, therapeutic agent with the present compounds (e.g. of Formulae I-XVI) and/or pharmaceutical compositions and/or lipid aggregates and/or lipid carriers in a method of expressing a protein of interest that has a therapeutic effect.

[0339] In embodiments, the present invention relates to method of treatment of a disease or disorder by delivering a therapeutic agent, e.g. nucleic acid, e.g. RNA, e.g. synthetic RNA, therapeutic agent with the present compounds (e.g. of Formulae I-XVI) and/or pharmaceutical compositions and/or lipid aggregates and/or lipid carriers in a method of expressing a gene-editing protein that has a therapeutic effect (e.g. gene-editing or gene correction, e.g. in vivo and/or ex vivo).

[0340] In embodiments, the present invention relates to method of treatment of a disease or disorder by delivering a therapeutic agent, e.g. nucleic acid, e.g. RNA, e.g. synthetic RNA, therapeutic agent with the present compounds (e.g. of Formulae I-XVI) and/or pharmaceutical compositions and/or lipid aggregates and/or lipid carriers in a method of expressing a reprogramming factor that has a therapeutic effect (e.g. ex vivo).

[0341] In embodiments, the present invention relates to method of treatment of a disease or disorder by delivering a therapeutic agent, e.g. nucleic acid, e.g. RNA, e.g. synthetic RNA, therapeutic agent with the present compounds (e.g. of Formulae I-XVI) and/or pharmaceutical compositions and/or lipid aggregates and/or lipid carriers in a method of expressing a gene-editing protein that has a therapeutic effect (e.g. gene-editing or gene correction, e.g. in vivo and/or ex vivo) and expressing a reprogramming factor that has a therapeutic effect (e.g. ex vivo).

[0342] Certain embodiments are directed to a method for treating a patient comprising: a. inducing a cell to express a protein of interest by transfecting the cell in vivo with a nucleic acid encoding the protein of interest and/or b. reprogramming the cell in vivo. In one embodiment, the cell is reprogrammed to a less differentiated state. In another embodiment, the cell is reprogrammed by transfecting the cell with one or more synthetic RNA molecules encoding one or more reprogramming proteins. In a further embodiment, the cell is differentiated. In a still further embodiment, the cell is differentiated into one of a skin cell, a glucose-responsive insulin-producing cell, a hematopoietic cell, a cardiac cell, a retinal cell, a renal cell, a neural cell, a stromal cell, a fat cell, a bone cell, a muscle cell, an oocyte, and a sperm cell. Other embodiments are directed to a method for treating a patient comprising: a. inducing a cell to express a gene-editing protein by transfecting the cell in vivo with a nucleic acid encoding a gene-editing protein and/or b. reprogramming the cell in vivo.

[0343] In embodiments, the treatment results in one or more of the patient's symptoms being ameliorated.

[0344] Certain embodiments are directed to methods and compositions for the treatment of rare diseases. In embodiments, the rare disease is one or more of a rare metabolic disease, a rare cardiovascular disease, a rare dermatologic disease, a rare neurologic disease, a rare developmental disease, a rare genetic disease, a rare pulmonary disease, a rare liver disease, a rare kidney disease, a rare psychiatric disease, a rare reproductive disease, a rare musculoskeletal disease, a rare orthopedic disease, an inborn error of metabolism, a lysosomal storage disease, and a rare ophthalmologic disease.

[0345] Examples of diseases that can be treated with the present invention include, but are not limited to Alzheimer's disease, spinal cord injury, amyotrophic lateral sclerosis, cystic fibrosis, heart disease, including ischemic and dilated cardiomyopathy, macular degeneration, Parkinson's disease, Huntington's disease, diabetes, sickle-cell anemia, thalassemia, Fanconi anemia, xeroderma pigmentosum, muscular dystrophy, severe combined immunodeficiency, hereditary sensory neuropathy, cancer, and HIV/AIDS.

[0346] Further examples of diseases that can be treated with the present invention include, but are not limited to type 1 diabetes, heart disease, including ischemic and dilated cardiomyopathy, macular degeneration, Parkinson's disease, cystic fibrosis, sickle-cell anemia, thalassemia, Fanconi anemia, severe combined immunodeficiency, hereditary sensory neuropathy, xeroderma pigmentosum, Huntington's disease, muscular dystrophy, amyotrophic lateral sclerosis, Alzheimer's disease, cancer, and infectious diseases including hepatitis and HIV/AIDS.

[0347] In embodiments, examples of diseases that can be treated with the present invention include infectious diseases. In some embodiments, the infectious disease is an infection with a pathogen, optionally selected from a bacterium, virus, fungus, or parasite. In some embodiments, the virus is: (a) an influenza virus, optionally selected from Type A, Type B, Type C, and Type D influenza viruses, or (b) a member of the Coronaviridae family, optionally selected from a betacoronavirus, optionally selected from severe acute respiratory syndrome coronavirus 2 (SARS-CoV-2), SARS-CoV, Middle East Respiratory Syndrome-Corona Virus (MERS-CoV), HCoV-HKU1, and HCoV-OC43 or an alphacoronavirus, optionally selected from HCoV-NL63 and HCoV-229E. In some embodiments, the virus is SARS-CoV-2. In some embodiments, the protein of interest, as described elsewhere herein, is an antigen, such as a 2019-nCoV protein, an antigenic fragment thereof, or a nucleic acid encoding the same, optionally selected from spike surface glycoprotein, membrane glycoprotein M, envelope protein E, and nucleocapsid phosphoprotein N. In some embodiments, protein of interest, as described elsewhere herein, is an antigen, such as the S1 or S2 subunit of the spike surface glycoprotein, or an antigenic fragment thereof.

[0348] In various embodiments, the subject is afflicted with coronavirus disease 2019 (COVID-19). In additional embodiments, the subject is elderly and/or afflicted with one or more comorbidities, including, but not limited to, hypertension and/or diabetes. A subject afflicted with a coronavirus infection can acquire symptoms including, but not limited to, fever, tiredness, dry cough, aches and pains, shortness of breath and other breathing difficulties, diarrhea, upper respiratory symptoms (e.g. sneezing, runny nose, nasal congestion, cough, sore throat), pneumonia, pneumonia respiratory failure, hepatic and renal insufficiency, acute respiratory distress syndrome (ARDS), and a cytokine imbalance.

[0349] In some embodiments, the virus is an influenza virus. In some embodiments, the protein of interest, as described elsewhere herein, is an antigen, such as an influenza viral antigen, optionally selected from hemagglutinin (HA) protein, matrix 2 (M2) protein, and neuraminidase, or an antigenic fragment thereof, or a nucleic acid encoding the same.

[0350] In embodiments, the disease or disorder is selected from diphtheria, tetanus, pertussis, influenza, pneumonia, hepatitis A, hepatitis B, polio, yellow fever, Human Papillomavirus (HPV) infection, anthrax, rabies, Japanese Encephalitis, meningitis, measles, mumps, rubella, gastroenteritis, smallpox, typhoid fever, varicella (chickenpox), rotavirus, and shingles. In some embodiments, the present invention relates to the treatment of hepatitis. Illustrative hepatitis that may be treated include, but is not limited to, hepatitis A, hepatitis B, hepatitis C, hepatitis D, hepatitis E, autoimmune hepatitis, alcoholic hepatitis, acute hepatitis, and chronic hepatitis.

[0351] In embodiments, the disease or disorder is metabolic disorder. In embodiments, the metabolic disorder is selected from a disorder of carbohydrate metabolism, a disorder of amino acid metabolism, a disorder of the urea cycle, a disorder of fatty acid metabolism, a disorder of porphyrin metabolism, a disorder of lysosomal storage, a disorder of peroxisome biogenesis, and a disorder of purine or pyrimidine metabolism.

[0352] In embodiments, the metabolic disorder is a disorder of carbohydrate metabolism and wherein the disease is galactosemia and the defective gene is optionally GALT, GALK1, or GALE; wherein the disease is essential fructosuria and the defective gene is optionally KHK; wherein the disease is Hereditary fructose intolerance and the defective gene is optionally ALDOB; wherein the disease is glycogen storage disease type I and the defective gene is optionally G6PC, SLC37A4, or SLC17A3; wherein the disease is glycogen storage disease type II and the defective gene is optionally GAA; wherein the disease is glycogen storage disease type III and the defective gene is optionally AGL; wherein the disease is glycogen storage disease type IV and the defective gene is optionally GBE1; wherein the disease is glycogen storage disease type V and the defective gene is optionally PYGM; wherein the disease is glycogen storage disease type VI and the defective gene is optionally PYGL; wherein the disease is glycogen storage disease type VII and the defective gene is optionally PYGM; wherein the disease is glycogen storage disease type IX and the defective gene is optionally PHKA1, PHKA2, PHKB, PHKG1, or PHKG2; wherein the disease is glycogen storage disease type XI and the defective gene is optionally SLC2A₂; wherein the disease is glycogen storage disease type XII and the defective gene is optionally ALDOA; wherein the disease is glycogen storage disease type XIII and the defective gene is optionally ENO1, ENO2, or ENO3; wherein the disease is glycogen storage disease type 0 and the defective gene is optionally GYS1 or GYS2; wherein the disease is pyruvate carboxylase deficiency and the defective gene is optionally PC; wherein the disease is pyruvate kinase deficiency and the defective gene is optionally PKLR; wherein the disease is transaldolase deficiency and the defective gene is optionally TALDO1; wherein the disease is triosephosphate isomerase deficiency and the defective gene is optionally TPI1; wherein the disease is fructose bisphosphatase deficiency and the defective gene is optionally FBP1; wherein the disease is hyperoxaluria and the defective gene is optionally AGXT or GRHPR; wherein the disease is hexokinase deficiency and the defective gene is optionally HK1; wherein the disease is glucose-galactose malabsorption and the defective gene is optionally SLC5A1; or wherein the disease is glucose-6-phosphate dehydrogenase deficiency and the defective gene is optionally G6PD.

[0353] In embodiments, the metabolic disorder is a disorder of amino acid metabolism wherein the disease is alkaptonuria and the defective gene is optionally HGD; wherein the disease is aspartylglucosaminuria and the defective gene is optionally AGA; wherein the disease is methylmalonic acidemia and the defective gene is optionally MUT, MCEE, MMAA, MMAB, MMACHC, MMADHC, or LMBRD1; wherein the disease is maple syrup urine disease and the defective gene is optionally BCKDHA, BCKDHB, DBT, or DLD; wherein the disease is homocystinuria and the defective gene is optionally CBS; wherein the disease is tyrosinemia and the defective gene is optionally FAH, TAT, or HPD; wherein the disease is trimethylaminuria and the defective gene is optionally FMO3; wherein the disease is Hartnup disease and the defective gene is optionally SLC6A19; wherein the disease is biotinidase deficiency and the defective gene is optionally BTD; wherein the disease is ornithine carbamoyltransferase deficiency and the defective gene is optionally OTC; wherein the disease is carbamoyl-phosphate synthase I deficiency disease and the defective gene is optionally CPS1; wherein the disease is citrullinemia and the defective gene is optionally ASS or SLC25A13; wherein the disease is hyperargininemia and the defective gene is optionally ARG1; wherein the disease is hyperhomocysteinemia and the defective gene is optionally MTHFR; wherein the disease is hypermethioninemia and the defective gene is optionally MAT1A, GNMT, or AHCY; wherein the disease is hyperlysinemias and the defective gene is optionally AASS; wherein the disease is nonketotic hyperglycinemia and the defective gene is optionally GLDC, AMT, or GCSH; wherein the disease is Propionic acidemia and the defective gene is optionally PCCA or PCCB; wherein the disease is hyperprolinemia and the defective gene is optionally ALDH4A1 or PRODH; wherein the disease is cystinuria and the defective gene is optionally SLC3A1 or SLC7A9; wherein the disease is dicarboxylic aminoaciduria and the defective gene is optionally SLC1A1; wherein the disease is glutaric acidemia type 2 and the defective gene is optionally ETFA, ETFB, or ETFDH; wherein the disease is isovaleric acidemia and the defective gene is optionally IVD; or wherein the disease is 2-hydroxyglutaric aciduria and the defective gene is optionally L2HGDH or D2HGDH.

[0354] In embodiments, the metabolic disorder is a disorder of the urea cycle wherein the disease is N-acetylglutamate synthase deficiency and the defective gene is optionally NAGS; wherein the disease is argininosuccinic aciduria and the defective gene is optionally ASL; or wherein the disease is argininemia and the defective gene is optionally ARG1.

[0355] In embodiments, the metabolic disorder is a disorder of fatty acid metabolism wherein the disease is very long-chain acyl-coenzyme A dehydrogenase deficiency and the defective gene is optionally ACADVL; wherein the disease is long-chain 3-hydroxyacyl-coenzyme A dehydrogenase deficiency and the defective gene is optionally HADHA; wherein the disease is medium-chain acyl-coenzyme A dehydrogenase deficiency and the defective gene is optionally ACADM; wherein the disease is short-chain acyl-coenzyme A dehydrogenase deficiency and the defective gene is optionally ACADS; wherein the disease is 3-hydroxyacyl-coenzyme A dehydrogenase deficiency and the defective gene is optionally HADH; wherein the disease is 2,4 dienoyl-CoA reductase deficiency and the defective gene is optionally NADK2; wherein the disease is 3-hydroxy-3-methylglutaryl-CoA lyase deficiency and the defective gene is optionally HMGCL; wherein the disease is malonyl-CoA decarboxylase deficiency and the defective gene is optionally MLYCD; wherein the disease is systemic primary carnitine deficiency and the defective gene is optionally SLC22A5; wherein the disease is carnitine-acylcarnitine translocase deficiency and the defective gene is optionally SLC25A20; wherein the disease is carnitine palmitoyltransferase I deficiency and the defective gene is optionally CPT1A; wherein the disease is carnitine palmitoyltransferase II deficiency and the defective gene is optionally CPT2; wherein the disease is lysosomal acid lipase deficiency and the defective gene is optionally LIPA; or wherein the disease is Gaucher's disease and the defective gene is optionally GBA.

[0356] In embodiments, the metabolic disorder is a disorder of porphyrin metabolism wherein the disease is acute intermittent porphyria and the defective gene is optionally HMBS; wherein the disease is Gunther disease and the defective gene is optionally UROS; wherein the disease is porphyria cutanea tarda and the defective gene is optionally UROD; wherein the disease is hepatoerythropoietic porphyria and the defective gene is optionally UROD; wherein the disease is hereditary coproporphyria and the defective gene is optionally CPDX; wherein the disease is variegate porphyria and the defective gene is optionally PPDX; wherein the disease is erythropoietic protoporphyria and the defective gene is optionally FECH; or wherein the disease is aminolevulinic acid dehydratase deficiency porphyria and the defective gene is optionally ALAD.

[0357] In embodiments, the metabolic disorder is a disorder of lysosomal storage wherein the disease is Farber disease and the defective gene is optionally ASAH1; wherein the disease is Krabbe disease and the defective gene is optionally GALC; wherein the disease is galactosialidosis and the defective gene is optionally CTSA; wherein the disease is fabry disease and the defective gene is optionally GLA; wherein the disease is Schindler disease and the defective gene is optionally NAGA; wherein the disease is GM1 gangliosidosis and the defective gene is optionally GLB1; wherein the disease is Tay-Sachs disease and the defective gene is optionally HEXA; wherein the disease is Sandhoff disease and the defective gene is optionally HEXB; wherein the disease is GM2-gangliosidosis, AB variant and the defective gene is optionally GM2A; wherein the disease is Niemann-Pick disease and the defective gene is optionally SMPD1, NPC1, or NPC2; wherein the disease is metachromatic leukodystrophy and the defective gene is optionally ARSA or PSAP; wherein the disease is multiple sulfatase deficiency and the defective gene is optionally SUMF1; wherein the disease is Hurler syndrome and the defective gene is optionally IDUA; wherein the disease is Hunter syndrome and the defective gene is optionally IDS; wherein the disease is Sanfilippo syndrome and the defective gene is optionally SGSH, NAGLU, HGSNAT, or GNS; wherein the disease is Morquio syndrome and the defective gene is optionally GALNS or GLB1; wherein the disease is Maroteaux-Lamy syndrome and the defective gene is optionally ARSB; wherein the disease is Sly syndrome and the defective gene is optionally GUSB; wherein the disease is sialidosis and the defective gene is optionally NEU1, NEU2, NEU3, or NEU4; wherein the disease is I-cell disease and the defective gene is optionally GNPTAB or GNPTG; wherein the disease is mucolipidosis type IV and the defective gene is optionally MCOLN1; wherein the disease is infantile neuronal ceroid lipofuscinosis and the defective gene is optionally PPT1 or PPT2; wherein the disease is Jansky-Bielschowsky disease and the defective gene is optionally TPP1; wherein the disease is Batten disease and the defective gene is optionally CLN1, CLN2, CLN3, CLN5, CLN6, MFSD8, CLN8, or CTSD; wherein the disease is Kufs disease, Type A and the defective gene is optionally CLN6 or PPT1; wherein the disease is Kufs disease, Type B and the defective gene is optionally DNAJC5 or CTSF; wherein the disease is alpha-mannosidosis and the defective gene is optionally MAN2B1, MAN2B2, or MAN2C1; wherein the disease is beta-mannosidosis and the defective gene is optionally MANBA; wherein the disease is fucosidosis and the defective gene is optionally FUCA1; wherein the disease is cystinosis and the defective gene is optionally CTNS; wherein the disease is pycnodysostosis and the defective gene is optionally CTSK; wherein the disease is Salla disease and the defective gene is optionally SLC17A5; wherein the disease is Infantile free sialic acid storage disease and the defective gene is optionally SLC17A5; or wherein the disease is Danon disease and the defective gene is optionally LAMP2.

[0358] In embodiments, the metabolic disorder is a disorder of peroxisome biogenesis wherein the disease is Zellweger syndrome and the defective gene is optionally PEX1, PEX2, PEX3, PEX5, PEX6, PEX12, PEX14, or PEX26; wherein the disease is Infantile Refsum disease and the defective gene is optionally PEX1, PEX2, or PEX26; wherein the disease is neonatal adrenoleukodystrophy and the defective gene is optionally PEX5, PEX1, PEX10, PEX13, or PEX26; wherein the disease is RCDP Type 1 and the defective gene is optionally PEX7; wherein the disease is pipecolic acidemia and the defective gene is optionally PAHX; wherein the disease is acatalasia and the defective gene is optionally CAT; wherein the disease is hyperoxaluria type 1 and the defective gene is optionally AGXT; wherein the disease is Acyl-CoA oxidase deficiency and the defective gene is optionally ACOX1; wherein the disease is D-bifunctional protein deficiency and the defective gene is optionally HSD17B4; wherein the disease is dihydroxyacetonephosphate acyltransferase deficiency and the defective gene is optionally GNPAT; wherein the disease is X-linked adrenoleukodystrophy and the defective gene is optionally ABCD1; wherein the disease is α-methylacyl-CoA racemase deficiency and the defective gene is optionally AMACR; wherein the disease is RCDP Type 2 and the defective gene is optionally DHAPAT; wherein the disease is RCDP Type 3 and the defective gene is optionally AGPS; wherein the disease is adult refsum disease-1 and the defective gene is optionally PHYH; or wherein the disease is mulibrey nanism and the defective gene is optionally TRIM37.

[0359] In embodiments, the metabolic disorder is a disorder of purine or pyrimidine metabolism wherein the disease is Lesch-Nyhan syndrome and the defective gene is optionally HPRT; wherein the disease is adenine phosphoribosyltransferase deficiency and the defective gene is optionally APRT; wherein the disease is adenosine deaminase deficiency and the defective gene is optionally ADA; wherein the disease is Adenosine monophosphate deaminase deficiency type 1 and the defective gene is optionally AMPD1; wherein the disease is adenylosuccinate lyase deficiency and the defective gene is optionally ADSL; wherein the disease is dihydropyrimidine dehydrogenase deficiency and the defective gene is optionally DPYD; wherein the disease is Miller syndrome and the defective gene is optionally DHODH; wherein the disease is orotic aciduria and the defective gene is optionally UMPS; wherein the disease is purine nucleoside phosphorylase deficiency and the defective gene is optionally PNP; or wherein the disease is xanthinuria and the defective gene is optionally XDH, MOCS1, or MOCS2, GEPH.

[0360] In embodiments, the present invention relates to a method for modulating transthyretin (TTR). The method comprising a step of administering an effective amount of a synthetic RNA encoding TTR to a subject, wherein the synthetic RNA comprises one or more non-canonical nucleotides that avoid substantial cellular toxicity.

[0361] In embodiments, the modulating results in an increase in the quantity of TTR in the subject.

[0362] In embodiments, the modulating results in a decrease in the quantity of TTR in the subject.

[0363] In embodiments, the modulating results in treatment of one or more of an amyloid disease, senile systemic amyloidosis (SSA), familial amyloid polyneuropathy (FAP), and familial amyloid cardiomyopathy (FAC).

[0364] In embodiments, the non-canonical nucleotides have one or more substitutions at positions selected from the 2C, 4C, and 5C positions for a pyrimidine, or selected from the 6C, 7N and 8C positions for a purine.

[0365] In emobidments, the present invention treats or reduces pain, e.g., post-surgical pain and/or chronic pain, by administering to a subject in need thereof an effective amount of a synthetic RNA encoding a gene-editing protein capable of creating a double-strand break in a voltage-gated sodium channel type 1 (NaV1) gene, e.g., NaV1.3, NaV1.7, NaV1.8, and/or NaV1.9.

[0366] In embodiments, the administering is directed to the central nervous system (CNS) or the peripheral nervous system (PNS), e.g., to neurons and glial cells of the CNS or PNS.

[0367] In embodiments, the disease or disorder is a lung disease or disorder. In embodiments, the disease or disorder is an inflammation is associated with a lung disease or disorder. In embodiments, the lung disease or disorder is selected from Asbestosis, Asthma, Bronchiectasis, Bronchitis, Chronic Cough, Chronic Obstructive Pulmonary Disease (COPD), Common Cold, Croup, Cystic Fibrosis, Hantavirus, Idiopathic Pulmonary Fibrosis, Influenza, Lung Cancer, Pandemic Flu, Pertussis, Pleurisy, Pneumonia, Pulmonary Embolism, Pulmonary Hypertension, Respiratory Syncytial Virus (RSV), Sarcoidosis, Sleep Apnea, Spirometry, Sudden Infant Death Syndrome (SIDS), and Tuberculosis.

[0368] Further still, in some embodiments, the present compositions may be used in the treatment, control, or prevention of a disease, disorder and/or condition and/or may alter, modify or change the appearance of a member of the integumentary system of a subject suffering from a disease, disorder and/or condition such as, but not limited to, acne vulgaris, acne aestivalis, acne conglobata, acne cosmetic, acne fulminans, acne keloidalis nuchae, acne mechanica, acne medicamentosa, acne miliaris necrotica, acne necrotica, acne rosacea, actinic keratosis, acne vulgaris, acne aestivalis, acne conglobata, acne cosmetic, acne fulminans, acne keloidalis nuchae, acne mechanica, acne medicamentosa, acne miliaris necrotica, acne necrotica, acne rosacea, acute urticaria, allergic contact dermatitis, alopecia areata, angioedema, athlete's foot, atopic dermatitis, autoeczematization, baby acne, balding, bastomycosis, blackheads, birthmarks and other skin pigmentation problems, boils, bruises, bug bites and stings, burns, cellulitis, chiggers, chloracne, cholinergic or stress uricara, chronic urticara, cold type urticara, confluent and reticulated papillomatosis, corns, cysts, dandruff, dermatitis herpetiformis, dermatographism, dyshidrotic eczema, diaper rash, dry skin, dyshidrosis, ectodermal dysplasia such as, hyprohidrotic ectodermal dysplasia and X-linked hyprohidrotic ectodermal dysplasia, eczema, epidermaodysplasia verruciformis, erythema nodosum, excoriated acne, exercise-induced anaphylasis folliculitis, excess skin oil, folliculitis, freckles, frostbite, fungal nails, hair density, hair growth rate, halogen acne, hair loss, heat rash, hematoma, herpes simplex infections (e.g. non-genital), hidradenitis suppurativa, hives, hyperhidrosis, hyperpigmentation, hypohidrotic ectodermal dysplasia, hypopigmentation, impetigo, ingrown hair, heat type urticara, ingrown toenail, infantile acne or neonatal acne, itch, irritant contact dermatitis, jock itch, keloid, keratosis pilaris, lichen planus, lichen sclerosus, lupus miliaris disseminatus faciei, melasma, moles, molluscum contagiosum, nail growth rate, nail health, neurodermatitis, nummular eczema, occupational acne, oil acne, onychomycosis, physical urticara, pilonidal cyst, pityriasis rosea, pityriasis versicolor, poison ivy, pomade acne, pseudofolliculitis barbae or acne keloidalis nuchae, psoriasis, psoriatic arthritis, pressure or delayed pressue urticara, puncture wounds such as cuts and scrapes, rash, rare or water type urticara, rhinoplasty, ringworm, rosacea, rothmund-thomson syndrome, sagging of the skin, scabis, scars, seborrhea, seborrheic dermatitis, shingles, skin cancer, skin tag, solar type urticara, spider bite, stretch marks, sunburn, tar acne, tropical acne, thinning of skin, thrush, tinea versicolor, transient acantholytic dermatosis, tycoon's cap or acne necrotica miliaris, uneven skin tone, varicose veins, venous eczema, vibratory angioedema, vitiligo, warts, Weber-Christian disease, wrinkles, x-linked hypohidrotic ectodermal dysplasia, xerotic eczema, yeast infection and general signs of aging.

[0369] Illustrative cancers and/or tumors of the present invention include, but are not limited to, a basal cell carcinoma, biliary tract cancer; bladder cancer; bone cancer; brain and central nervous system cancer; breast cancer; cancer of the peritoneum; cervical cancer; choriocarcinoma; colon and rectum cancer; connective tissue cancer; cancer of the digestive system; endometrial cancer; esophageal cancer; eye cancer; cancer of the head and neck; gastric cancer (including gastrointestinal cancer); glioblastoma; hepatic carcinoma; hepatoma; intra-epithelial neoplasm; kidney or renal cancer; larynx cancer; leukemia; liver cancer; lung cancer (e.g., small-cell lung cancer, non-small cell lung cancer, adenocarcinoma of the lung, and squamous carcinoma of the lung); melanoma; myeloma; neuroblastoma; oral cavity cancer (lip, tongue, mouth, and pharynx); ovarian cancer; pancreatic cancer; prostate cancer; retinoblastoma; rhabdomyosarcoma; rectal cancer; cancer of the respiratory system; salivary gland carcinoma; sarcoma; skin cancer; squamous cell cancer; stomach cancer; testicular cancer; thyroid cancer; uterine or endometrial cancer; cancer of the urinary system; vulval cancer; lymphoma including Hodgkin's and non-Hodgkin's lymphoma, as well as B-cell lymphoma (including low grade/follicular non-Hodgkin's lymphoma (NHL); small lymphocytic (SL) NHL; intermediate grade/follicular NHL; intermediate grade diffuse NHL; high grade immunoblastic NHL; high grade lymphoblastic NHL; high grade small non-cleaved cell NHL; bulky disease NHL; mantle cell lymphoma; AIDS-related lymphoma; and Waldenstrom's Macroglobulinemia; chronic lymphocytic leukemia (CLL); acute lymphoblastic leukemia (ALL); Hairy cell leukemia; chronic myeloblastic leukemia; as well as other carcinomas and sarcomas; and post-transplant lymphoproliferative disorder (PTLD), as well as abnormal vascular proliferation associated with phakomatoses, edema (such as that associated with brain tumors), and Meigs' syndrome.

[0370] In embodiments, one or more rare diseases are treated, controlled or prevented with the present compositions, including, by way of illustration, Erythropoietic Protoporphyria, Hailey-Hailey Disease, Epidermolysis Bullosa (EB), Xeroderma Pigmentosum, Ehlers-Danlos Syndrome, Cutis Laxa, Protein C & Protein S Deficiency, Alport Syndrome, Striate Palmoplantar Keratoderma, Lethal Acantholytic EB, Pseudoxanthoma Elasticum (PXE), Ichthyosis Vulgaris, Pemphigus Vulgaris, and Basal Cell Nevus Syndrome.

[0371] In embodiments, the present compositions are used to treat, control or prevent one or more inflammatory diseases or conditions, such as inflammation, acute inflammation, chronic inflammation, respiratory disease, atherosclerosis, restenosis, asthma, allergic rhinitis, atopic dermatitis, septic shock, rheumatoid arthritis, inflammatory bowel disease, inflammatory pelvic disease, pain, ocular inflammatory disease, celiac disease, Leigh Syndrome, Glycerol Kinase Deficiency, Familial eosinophilia (FE), autosomal recessive spastic ataxia, laryngeal inflammatory disease; Tuberculosis, Chronic cholecystitis, Bronchiectasis, Silicosis and other pneumoconioses.

[0372] In embodiments, the present compositions are used to treat, control or prevent one or more autoimmune diseases or conditions, such as multiple sclerosis, diabetes mellitus, lupus, celiac disease, Crohn's disease, ulcerative colitis, Guillain-Barre syndrome, scleroderms, Goodpasture's syndrome, Wegener's granulomatosis, autoimmune epilepsy, Rasmussen's encephalitis, Primary biliary sclerosis, Sclerosing cholangitis, Autoimmune hepatitis, Addison's disease, Hashimoto's thyroiditis, Fibromyalgia, Menier's syndrome; transplantation rejection (e.g., prevention of allograft rejection) pernicious anemia, rheumatoid arthritis, systemic lupus erythematosus, dermatomyositis, Sjogren's syndrome, lupus erythematosus, multiple sclerosis, myasthenia gravis, Reiter's syndrome, Grave's disease, and other autoimmune diseases.

[0373] In embodiments, the present compositions are used to treat, control or prevent one or more neurologic diseases, including ADHD, AIDS—Neurological Complications, Absence of the Septum Pellucidum, Acquired Epileptiform Aphasia, Acute Disseminated Encephalomyelitis, Adrenoleukodystrophy, Agenesis of the Corpus Callosum, Agnosia, Aicardi Syndrome, Alexander Disease, Alpers' Disease, Alternating Hemiplegia, Alzheimer's Disease, Amyotrophic Lateral Sclerosis, Anencephaly, Aneurysm, Angelman Syndrome, Angiomatosis, Anoxia, Aphasia, Apraxia, Arachnoid Cysts, Arachnoiditis, Arnold-Chiari Malformation, Arteriovenous Malformation, Aspartame, Asperger Syndrome, Ataxia Telangiectasia, Ataxia, Attention Deficit-Hyperactivity Disorder, Autism, Autonomic Dysfunction, Back Pain, Barth Syndrome, Batten Disease, Behcet's Disease, Bell's Palsy, Benign Essential Blepharospasm, Benign Focal Amyotrophy, Benign Intracranial Hypertension, Bernhardt-Roth Syndrome, Binswanger's Disease, Blepharospasm, Bloch-Sulzberger Syndrome, Brachial Plexus Birth Injuries, Brachial Plexus Injuries, Bradbury-Eggleston Syndrome, Brain Aneurysm, Brain Injury, Brain and Spinal Tumors, Brown-Sequard Syndrome, Bulbospinal Muscular Atrophy, Canavan Disease, Carpal Tunnel Syndrome, Causalgia, Cavernomas, Cavernous Angioma, Cavernous Malformation, Central Cervical Cord Syndrome, Central Cord Syndrome, Central Pain Syndrome, Cephalic Disorders, Cerebellar Degeneration, Cerebellar Hypoplasia, Cerebral Aneurysm, Cerebral Arteriosclerosis, Cerebral Atrophy, Cerebral Beriberi, Cerebral Gigantism, Cerebral Hypoxia, Cerebral Palsy, Cerebro-Oculo-Facio-Skeletal Syndrome, Charcot-Marie-Tooth Disorder, Chiari Malformation, Chorea, Choreoacanthocytosis, Chronic Inflammatory Demyelinating Polyneuropathy (CIDP), Chronic Orthostatic Intolerance, Chronic Pain, Cockayne Syndrome Type II, Coffin Lowry Syndrome, Coma, including Persistent Vegetative State, Complex Regional Pain Syndrome, Congenital Facial Diplegia, Congenital Myasthenia, Congenital Myopathy, Congenital Vascular Cavernous Malformations, Corticobasal Degeneration, Cranial Arteritis, Craniosynostosis, Creutzfeldt-Jakob Disease, Cumulative Trauma Disorders, Cushing's Syndrome, Cytomegalic Inclusion Body Disease (CIBD), Cytomegalovirus Infection, Dancing Eyes-Dancing Feet Syndrome, Dandy-Walker Syndrome, Dawson Disease, De Morsier's Syndrome, Dejerine-Klumpke Palsy, Dementia—Multi-Infarct, Dementia-Subcortical, Dementia With Lewy Bodies, Dermatomyositis, Developmental Dyspraxia, Devic's Syndrome, Diabetic Neuropathy, Diffuse Sclerosis, Dravet's Syndrome, Dysautonomia, Dysgraphia, Dyslexia, Dysphagia, Dyspraxia, Dystonias, Early Infantile Epileptic Encephalopathy, Empty Sella Syndrome, Encephalitis Lethargica, Encephalitis and Meningitis, Encephaloceles, Encephalopathy, Encephalotrigeminal Angiomatosis, Epilepsy, Erb's Palsy, Erb-Duchenne and Dejerine-Klumpke Palsies, Fabry's Disease, Fahr's Syndrome, Fainting, Familial Dysautonomia, Familial Hemangioma, Familial Idiopathic Basal Ganglia Calcification, Familial Spastic Paralysis, Febrile Seizures (e.g., GEFS and GEFS plus), Fisher Syndrome, Floppy Infant Syndrome, Friedreich's Ataxia, Gaucher's Disease, Gerstmann's Syndrome, Gerstmann-Straussler-Scheinker Disease, Giant Cell Arteritis, Giant Cell Inclusion Disease, Globoid Cell Leukodystrophy, Glossopharyngeal Neuralgia, Guillain-Barre Syndrome, HTLV-1 Associated Myelopathy, Hallervorden-Spatz Disease, Head Injury, Headache, Hemicrania Continua, Hemifacial Spasm, Hemiplegia Alterans, Hereditary Neuropathies, Hereditary Spastic Paraplegia, Heredopathia Atactica Polyneuritiformis, Herpes Zoster Oticus, Herpes Zoster, Hirayama Syndrome, Holoprosencephaly, Huntington's Disease, Hydranencephaly, Hydrocephalus—Normal Pressure, Hydrocephalus, Hydromyelia, Hypercortisolism, Hypersomnia, Hypertonia, Hypotonia, Hypoxia, Immune-Mediated Encephalomyelitis, Inclusion Body Myositis, Incontinentia Pigmenti, Infantile Hypotonia, Infantile Phytanic Acid Storage Disease, Infantile Refsum Disease, Infantile Spasms, Inflammatory Myopathy, Intestinal Lipodystrophy, Intracranial Cysts, Intracranial Hypertension, Isaac's Syndrome, Joubert Syndrome, Kearns-Sayre Syndrome, Kennedy's Disease, Kinsbourne syndrome, Kleine-Levin syndrome, Klippel Feil Syndrome, Klippel-Trenaunay Syndrome (KTS), Kluver-Bucy Syndrome, Korsakoffs Amnesic Syndrome, Krabbe Disease, Kugelberg-Welander Disease, Kuru, Lambert-Eaton Myasthenic Syndrome, Landau-Kleffner Syndrome, Lateral Femoral Cutaneous Nerve Entrapment, Lateral Medullary Syndrome, Learning Disabilities, Leigh's Disease, Lennox-Gastaut Syndrome, Lesch-Nyhan Syndrome, Leukodystrophy, Levine-Critchley Syndrome, Lewy Body Dementia, Lissencephaly, Locked-In Syndrome, Lou Gehrig's Disease, Lupus—Neurological Sequelae, Lyme Disease—Neurological Complications, Machado-Joseph Disease, Macrencephaly, Megalencephaly, Melkersson-Rosenthal Syndrome, Meningitis, Menkes Disease, Meralgia Paresthetica, Metachromatic Leukodystrophy, Microcephaly, Migraine, Miller Fisher Syndrome, Mini-Strokes, Mitochondrial Myopathies, Mobius Syndrome, Monomelic Amyotrophy, Motor Neuron Diseases, Moyamoya Disease, Mucolipidoses, Mucopolysaccharidoses, Multi-Infarct Dementia, Multifocal Motor Neuropathy, Multiple Sclerosis, Multiple System Atrophy with Orthostatic Hypotension, Multiple System Atrophy, Muscular Dystrophy, Myasthenia-Congenital, Myasthenia Gravis, Myelinoclastic Diffuse Sclerosis, Myoclonic Encephalopathy of Infants, Myoclonus, Myopathy—Congenital, Myopathy—Thyrotoxic, Myopathy, Myotonia Congenita, Myotonia, Narcolepsy, Neuroacanthocytosis, Neurodegeneration with Brain Iron Accumulation, Neurofibromatosis, Neuroleptic Malignant Syndrome, Neurological Complications of AIDS, Neurological Manifestations of Pompe Disease, Neuromyelitis Optica, Neuromyotonia, Neuronal Ceroid Lipofuscinosis, Neuronal Migration Disorders, Neuropathy—Hereditary, Neurosarcoidosis, Neurotoxicity, Nevus Cavernosus, Niemann-Pick Disease, O'Sullivan-McLeod Syndrome, Occipital Neuralgia, Occult Spinal Dysraphism Sequence, Ohtahara Syndrome, Olivopontocerebellar Atrophy, Opsoclonus Myoclonus, Orthostatic Hypotension, Overuse Syndrome, Pain—Chronic, Paraneoplastic Syndromes, Paresthesia, Parkinson's Disease, Parnyotonia Congenita, Paroxysmal Choreoathetosis, Paroxysmal Hemicrania, Parry-Romberg, Pelizaeus-Merzbacher Disease, Pena Shokeir II Syndrome, Perineural Cysts, Periodic Paralyses, Peripheral Neuropathy, Periventricular Leukomalacia, Persistent Vegetative State, Pervasive Developmental Disorders, Phytanic Acid Storage Disease, Pick's Disease, Piriformis Syndrome, Pituitary Tumors, Polymyositis, Pompe Disease, Porencephaly, Post-Polio Syndrome, Postherpetic Neuralgia, Postinfectious Encephalomyelitis, Postural Hypotension, Postural Orthostatic Tachycardia Syndrome, Postural Tachycardia Syndrome, Primary Lateral Sclerosis, Prion Diseases, Progressive Hemifacial Atrophy, Progressive Locomotor Ataxia, Progressive Multifocal Leukoencephalopathy, Progressive Sclerosing Poliodystrophy, Progressive Supranuclear Palsy, Pseudotumor Cerebri, Pyridoxine Dependent and Pyridoxine Responsive Siezure Disorders, Ramsay Hunt Syndrome Type I, Ramsay Hunt Syndrome Type II, Rasmussen's Encephalitis and other autoimmune epilepsies, Reflex Sympathetic Dystrophy Syndrome, Refsum Disease—Infantile, Refsum Disease, Repetitive Motion Disorders, Repetitive Stress Injuries, Restless Legs Syndrome, Retrovirus-Associated Myelopathy, Rett Syndrome, Reye's Syndrome, Riley-Day Syndrome, SUNCT Headache, Sacral Nerve Root Cysts, Saint Vitus Dance, Salivary Gland Disease, Sandhoff Disease, Schilder's Disease, Schizencephaly, Seizure Disorders, Septo-Optic Dysplasia, Severe Myoclonic Epilepsy of Infancy (SMEI), Shaken Baby Syndrome, Shingles, Shy-Drager Syndrome, Sjogren's Syndrome, Sleep Apnea, Sleeping Sickness, Soto's Syndrome, Spasticity, Spina Bifida, Spinal Cord Infarction, Spinal Cord Injury, Spinal Cord Tumors, Spinal Muscular Atrophy, Spinocerebellar Atrophy, Steele-Richardson-Olszewski Syndrome, Stiff-Person Syndrome, Striatonigral Degeneration, Stroke, Sturge-Weber Syndrome, Subacute Sclerosing Panencephalitis, Subcortical Arteriosclerotic Encephalopathy, Swallowing Disorders, Sydenham Chorea, Syncope, Syphilitic Spinal Sclerosis, Syringohydromyelia, Syringomyelia, Systemic Lupus Erythematosus, Tabes Dorsalis, Tardive Dyskinesia, Tarlov Cysts, Tay-Sachs Disease, Temporal Arteritis, Tethered Spinal Cord Syndrome, Thomsen Disease, Thoracic Outlet Syndrome, Thyrotoxic Myopathy, Tic Douloureux, Todd's Paralysis, Tourette Syndrome, Transient Ischemic Attack, Transmissible Spongiform Encephalopathies, Transverse Myelitis, Traumatic Brain Injury, Tremor, Trigeminal Neuralgia, Tropical Spastic Paraparesis, Tuberous Sclerosis, Vascular Erectile Tumor, Vasculitis including Temporal Arteritis, Von Economo's Disease, Von Hippel-Lindau disease (VHL), Von Recklinghausen's Disease, Wallenberg's Syndrome, Werdnig-Hoffman Disease, Wernicke-Korsakoff Syndrome, West Syndrome, Whipple's Disease, Williams Syndrome, Wilson's Disease, X-Linked Spinal and Bulbar Muscular Atrophy, and Zellweger Syndrome.

[0374] In embodiments, the present compositions are used to treat and reduce pain, e.g., post-surgical pain or chronic pain.

[0375] In embodiments, the present compositions are used to treat Huntington's disease.

[0376] In embodiments, the present compositions are used to treat sickle-cell anemia or thalassemia.

[0377] In embodiments, the present compositions alter RNA splicing of exons associated with a disease or disorder. In embodiments, the disease or disorder is selected from Alport Syndrome, Alzheimer's disease, Bethlem myopathy and Ullrich scleroatonic muscular dystrophy, Duchenne muscular dystrophy, Dystrophic Epidermolysis Bullosa, Friedreich ataxia, Huntington's Disease, Junctional Epidermolysis Bullosa, Leber's congenital amaurosis (LCA), and various myopathies and dystrophies.

[0378] In embodiments, the present compositions are used to treat one or more respiratory diseases, such as asthma, chronic obstructive pulmonary disease (COPD), bronchiectasis, allergic rhinitis, sinusitis, pulmonary vasoconstriction, inflammation, allergies, impeded respiration, respiratory distress syndrome, cystic fibrosis, pulmonary hypertension, pulmonary vasoconstriction, emphysema, Hantavirus pulmonary syndrome (HPS), Loeffler's syndrome, Goodpasture's syndrome, Pleurisy, pneumonitis, pulmonary edema, pulmonary fibrosis, Sarcoidosis, complications associated with respiratory syncitial virus infection, and other respiratory diseases.

[0379] In embodiments, the present compositions are used to treat, control or prevent cardiovascular disease, such as a disease or condition affecting the heart and vasculature, including but not limited to, coronary heart disease (CHD), cerebrovascular disease (CVD), aortic stenosis, peripheral vascular disease, atherosclerosis, arteriosclerosis, myocardial infarction (heart attack), cerebrovascular diseases (stroke), transient ischaemic attacks (TIA), angina (stable and unstable), atrial fibrillation, arrhythmia, vavular disease, and/or congestive heart failure.

[0380] In embodiments, the present compositions are used to treat, control or prevent one or more metabolic-related disorders. In embodiments, the present invention is useful for the treatment, controlling or prevention of diabetes, including Type 1 and Type 2 diabetes and diabetes associated with obesity. The compositions and methods of the present invention are useful for the treatment or prevention of diabetes-related disorders, including without limitation diabetic nephropathy, hyperglycemia, impaired glucose tolerance, insulin resistance, obesity, lipid disorders, dyslipidemia, hyperlipidemia, hypertriglyceridemia, hypercholesterolemia, low HDL levels, high LDL levels, atherosclerosis and its sequelae, vascular restenosis, irritable bowel syndrome, inflammatory bowel disease, including Crohn's disease and ulcerative colitis, other inflammatory conditions, pancreatitis, abdominal obesity, neurodegenerative disease, retinopathy, neoplastic conditions, adipose cell tumors, adipose cell carcinomas, such as liposarcoma, prostate cancer and other cancers, including gastric, breast, bladder and colon cancers, angiogenesis, Alzheimer's disease, psoriasis, high blood pressure, Metabolic Syndrome (e.g. a person has three or more of the following disorders: abdominal obesity, hypertriglyceridemia, low HDL cholesterol, high blood pressure, and high fasting plasma glucose), ovarian hyperandrogenism (polycystic ovary syndrome), and other disorders where insulin resistance is a component, such as sleep apnea. The compositions and methods of the present invention are useful for the treatment, control, or prevention of obesity, including genetic or environmental, and obesity-related disorders. The obesity-related disorders herein are associated with, caused by, or result from obesity. Examples of obesity-related disorders include obesity, diabetes, overeating, binge eating, and bulimia, hypertension, elevated plasma insulin concentrations and insulin resistance, dyslipidemia, hyperlipidemia, endometrial, breast, prostate, kidney and colon cancer, osteoarthritis, obstructive sleep apnea, gallstones, heart disease, abnormal heart rhythms and arrythmias, myocardial infarction, congestive heart failure, coronary heart disease, sudden death, stroke, polycystic ovary disease, craniopharyngioma, Prader-Willi Syndrome, Frohlich's syndrome, GH-deficient subjects, normal variant short stature, Turner's syndrome, and other pathological conditions showing reduced metabolic activity or a decrease in resting energy expenditure as a percentage of total fat-free mass, e.g, children with acute lymphoblastic leukemia. Further examples of obesity-related disorders are Metabolic Syndrome, insulin resistance syndrome, reproductive hormone abnormalities, sexual and reproductive dysfunction, such as impaired fertility, infertility, hypogonadism in males and hirsutism in females, fetal defects associated with maternal obesity, gastrointestinal motility disorders, such as obesity-related gastro-esophageal reflux, respiratory disorders, such as obesity-hypoventilation syndrome (Pickwickian syndrome), breathlessness, cardiovascular disorders, inflammation, such as systemic inflammation of the vasculature, arteriosclerosis, hypercholesterolemia, lower back pain, gallbladder disease, hyperuricemia, gout, and kidney cancer, and increased anesthetic risk. The compositions and methods of the present invention are also useful to treat Alzheimer's disease.

[0381] Nucleic acids, including liposomal formulations containing nucleic acids, when delivered in vivo, can accumulate in the liver and/or spleen. It has now been discovered that nucleic acids encoding proteins can modulate protein expression in the liver and spleen, and that nucleic acids used in this manner can constitute potent therapeutics for the treatment of liver and spleen diseases. Certain embodiments are therefore directed to a method for treating liver and/or spleen disease by delivering to a patient a nucleic acid encoding a protein of interest. Other embodiments are directed to a therapeutic composition comprising a nucleic acid encoding a protein of interest, for the treatment of liver and/or spleen disease. Diseases and conditions of the liver and/or spleen that can be treated include, but are not limited to: hepatitis, alcohol-induced liver disease, drug-induced liver disease, Epstein Barr virus infection, adenovirus infection, cytomegalovirus infection, toxoplasmosis, Rocky Mountain spotted fever, non-alcoholic fatty liver disease, hemochromatosis, Wilson's Disease, Gilbert's Disease, and cancer of the liver and/or spleen.

[0382] In some embodiments, the present compositions and methods relate to the treatment of type 1 diabetes, heart disease, including ischemic and dilated cardiomyopathy, macular degeneration, Parkinson's disease, cystic fibrosis, sickle-cell anemia, thalassemia, Fanconi anemia, severe combined immunodeficiency, hereditary sensory neuropathy, xeroderma pigmentosum, Huntington's disease, muscular dystrophy, amyotrophic lateral sclerosis, Alzheimer's disease, cancer, and infectious diseases including hepatitis and HIV/AIDS.

[0383] In embodiments, the present methods and compositions find use in treating or preventing one or more metabolic diseases or disorders. In embodiments, the present methods and compositions find use in treating or preventing one or more of diseases or disorders of carbohydrate metabolism. diseases or disorders of amino acid metabolism, diseases or disorders of the urea cycle, diseases or disorders of fatty acid metabolism, diseases or disorders of porphyrin metabolism, lysosomal storage disorders, peroxisome biogenesis disorders, and diseases or disorders of purine or pyrimidine metabolism.

[0384] In embodiments, the present methods and compositions find use in treating or preventing one or more ophthalmologic diseases or disorders, including without limitation diabetic retinopathy, dry eye, cataracts, retinal vein occlusion, macular edema, macular degeneration (wet & dry), refraction and accommodation disorders, keratoconus, amblyopia, glaucoma, Stargardt disease, endophthalmitis, conjunctivitis, uveitis, retinal detachment, corneal ulcers, dacryocystitis, Duane retraction syndrome, and optic neuritis.

[0385] In embodiments, the ophthalmologic diseases or disorders is central serous retinopathy (CSR), adult vitelliform disease, uveitis, both primary and secondary to systemic disease (e.g. by way of non-limiting example, sarcoid, rheumatoid disease, the arthritidities, etc.), the white dot syndromes (including MEWDS (multiple evanescent white dot syndrome), serpiginous choroidopathy, AMPPE (acute multifocal posterior placoid epitheliopathy), POHS (presumed ocular histoplasmosis), or Serpiginous Chorioretinopathy. In some embodiments, the disease can be a maculopathy or cone dystrophy such as, by way or non-limiting example, Stargardt disease. In some embodiments, the disease can be an inherited degenerative disease such as Retinitis Pigmentosa (RP). In some embodiments, the ocular disease can be an ocular melanoma, an ocular tumor or an infiltrating tumor.

[0386] In embodiments, the ophthalmologic disease or disorder is Fuch's corenal dystrophy. In embodiments, the ophthalmologic disease or disorder is Leber congenital amaurosis.

[0387] In embodiments, the present methods and compositions find use in targeting any of the proteins or in treatment of any of the diseases or disorders of Table 2A, Table 2B, and/or Table 2C.

[0388] In various embodiments, the present methods and compositions include using a nucleic acid drug, including a synthetic RNA, in the diagnosing, treating, preventing or ameliorating of a disease, disorder and/or condition described herein. In various embodiments, the present methods and compositions include using a nucleic acid drug, including a synthetic RNA, in the altering, modifying and/or changing of a tissue (e.g. cosmetically). Generally speaking, in various embodiments, a synthetic RNA as described herein is administered to a human at specific doses described herein and the synthetic RNA comprises a sequence, sometimes referred to as a target sequence that encodes a protein of interest, which may be a therapeutic protein.

[0389] Synthetic RNA comprising only canonical nucleotides can bind to pattern recognition receptors, can be recognized as a pathogen-associated molecular pattern, and can trigger a potent immune response in cells, which can result in translation block, the secretion of inflammatory cytokines, and cell death. Synthetic RNA comprising certain non-canonical nucleotides can evade detection by the innate immune system, and can be translated at high efficiency into protein, including in humans. Synthetic RNA comprising at least one of the non-canonical nucleotides described herein, including, for example, a member of the group: 5-methylcytidine, 5-hydroxycytidine, 5-hydroxymethylcytidine, 5-carboxycytidine, 5-formylcytidine, 5-methoxycytidine, pseudouridine, 5-hydroxyuridine, 5-methyluridine, 5-hydroxymethyluridine, 5-carboxyuridine, 5-methoxyuridine, 5-formyluridine, 5-hydroxypseudouridine, 5-methylpseudouridine, 5-hydroxymethylpseudouridine, 5-carboxypseudouridine, 5-methoxypseudouridine, and 5-formylpseudouridine can evade detection by the innate immune system, and can be translated at high efficiency into protein, including in humans. Certain embodiments are therefore directed to a method for inducing a cell to express a protein of interest comprising contacting a cell with synthetic RNA. Other embodiments are directed to a method for transfecting a cell with synthetic RNA comprising contacting a cell with a solution comprising one or more synthetic RNA molecules. Still other embodiments are directed to a method for treating a patient comprising administering to the patient synthetic RNA. In one embodiment, the synthetic RNA comprises at least one of the non-canonical nucleotides described herein, including, for example, a member of the group: 5-methylcytidine, 5-hydroxycytidine, 5-hydroxymethylcytidine, 5-carboxycytidine, 5-formylcytidine, 5-methoxycytidine, pseudouridine, 5-hydroxyuridine, 5-methyluridine, 5-hydroxymethyluridine, 5-carboxyuridine, 5-methoxyuridine, 5-formyluridine, 5-hydroxypseudouridine, 5-methylpseudouridine, 5-hydroxymethylpseudouridine, 5-carboxypseudouridine, 5-methoxypseudouridine, and 5-formylpseudouridine. In another embodiment, the synthetic RNA encodes a protein of interest. Illustrative RNAs may contain combinations and levels of non-canonical and non-canonical nucleotides as described elsewhere herein. In embodiments, the method results in the expression of the protein of interest. In embodiments, the method results in the expression of the protein of interest in the patient's skin.

[0390] Other embodiments are directed to a method for delivering a nucleic acid to a cell in vivo. Still other embodiments are directed to a method for inducing a cell in vivo to express a protein of interest. Still other embodiments are directed to a method for treating a patient. In one embodiment, the method comprises disrupting the stratum corneum. In another embodiment, the method comprises contacting a cell with a nucleic acid. In yet another embodiment, the method results in the cell internalizing the nucleic acid. In a further embodiment, the method results in the cell expressing the protein of interest. In a still further embodiment, the method results in the expression of the protein of interest in the patient. In a still further embodiment, the method results in the amelioration of one or more of the patient's symptoms. In a still further embodiment, the patient is in need of the protein of interest. In a still further embodiment, the patient is deficient in the protein of interest. Still other embodiments are directed to a method for treating a patient comprising delivering to a patient a composition. In another embodiment, the composition comprises one or more nucleic acid molecules. In yet another embodiment, at least one of the one or more nucleic acid molecules encodes a protein of interest. In embodiments, the nucleic acid is synthetic RNA. In other embodiments, the method results in the amelioration of one or more of the patient's symptoms. Other embodiments are directed to a method for treating an indication by delivering to a cell or a patient a nucleic acid encoding a protein or a peptide. Still other embodiments are directed to a composition comprising a nucleic acid encoding a protein or a peptide. Indications that can be treated using the methods and compositions of the present invention and proteins and peptides that can be encoded by compositions of the present invention are set forth in Table 2A, Table 2B, and/or Table 2C, and are given by way of example, and not by way of limitation. In one embodiment, the indication is selected from Table 2A, Table 2B, and/or Table 2C. In another embodiment the protein or peptide is selected from Table 2A, Table 2B, and/or Table 2C. In yet another embodiment, the indication and the protein or peptide are selected from the same row of Table 2A, Table 2B, and/or Table 2C. In another embodiment, the protein is a gene-editing protein. In yet another embodiment, the gene-editing protein targets a gene that is at least partly responsible for a disease phenotype. In yet another embodiment, the gene-editing protein targets a gene that encodes a protein selected from Table 2A, Table 2B, and/or Table 2C. In still another embodiment, the gene-editing protein corrects or eliminates, either alone or in combination with one or more other molecules or gene-editing proteins, a mutation that is at least partly responsible for a disease phenotype.

[0391] In various embodiments, the present invention contemplates the targeting of the precursor forms and/or mature forms and/or isoforms and/or mutants of any of the proteins disclosed in Table 2A, Table 2B, and/or Table 2C and such proteins. In embodiments, any of the precursor forms and/or mature forms and/or isoforms and/or mutants have enhanced secretion relative to the corresponding wild type proteins. In embodiments, any of the precursor forms and/or mature forms and/or isoforms and/or mutants have altered half-lives (e.g. serum, plasma, intracellular)—for instance, longer or shorter half-lives. In embodiments, this is relative to wild type.

TABLE 2A
Illustrative Indications

| Illustrative | |
|---|---|
| Indication | Illustrative Protein/Peptide |
| Acne | Retinol Dehydrogenase 10 |
| Aging | Elastin, sp\|P15502\|ELN_HUMAN Elastin, |
| | (isoform 3), (SEQ ID NO: 486) |
| Aging | Collagen Type I, P02452\|CO1A1_HUMAN |
| | Collagen alpha-1(I) chain, (SEQ ID NO: 487); |
| | P08123\|CO1A2_HUMAN Collagen alpha-2(I) |
| | chain, (SEQ ID NO: 488) |
| Aging | Collagen Type III, P02461\|CO3A1_HUMAN |
| | Collagen alpha-1(III) chain, (isoform 1), (SEQ |
| | ID NO: 489) |
| Aging | Collagen Type VII, Q02388\|CO7A1_HUMAN |
| | Collagen alpha-1(VII) chain, (SEQ ID NO: 490) |
| Aging | Hyaluronan Synthase |
| Aging | Telomerase Reverse Transcriptase |
| Albinism | Tyrosinase, P14679\|TYRO_HUMAN |
| | Tyrosinase, (isoform 1), (SEQ ID NO: 491) |
| Alport Syndrome | Collagen Type IV; P02462\|CO4A1_HUMAN |
| | Collagen alpha-1(IV) chain, (isoform 1), (SEQ |
| | ID NO: 492); P08572\|CO4A2_HUMAN |
| | Collagen alpha-2(IV) chain, (SEQ ID NO: 493); |
| | Q01955\|CO4A3_HUMAN Collagen alpha- |
| | 3(IV) chain, (isoform 1), (SEQ ID NO: 494); |
| | P53420\|CO4A4_HUMAN Collagen alpha-4(IV) |
| | chain, (SEQ ID NO: 495); P29400\|CO4A5_ |
| | HUMAN Collagen alpha-5(IV) chain, (isoform |
| | 1), (SEQ ID NO: 496); Q14031\|CO4A6_ |
| | HUMAN Collagen alpha-6(IV), (isoform A), |
| | (SEQ ID NO: 497) |
| Anemia | Erythropoietin |
| Atopic Dermatitis | Filaggrin |
| Cutis Laxa | Elastin, sp\|P15502\|ELN_HUMAN Elastin, |
| | (isoform 3), (SEQ ID NO: 486) |
| Dry Skin | Filaggrin |
| Dystrophic | Collagen Type VII; Q02388\|CO7A1_HUMAN |
| Epidermolysis | Collagen alpha-1(VII) chain, (SEQ ID NO: 498) |
| Bullosa | |
| Ehlers-Danlos | Collagen Type V; P20908\|CO5A1_HUMAN |
| Syndrome | Collagen alpha-1(V) chain, (SEQ ID NO: 499); |
| | P05997\|CO5A2_HUMAN Collagen alpha-2(V) |
| | chain, (SEQ ID NO: 500); P25940\|CO5A3_ |
| | HUMAN Collagen alpha-3(V) chain, (SEQ ID |
| | NO: 501) |
| Ehlers-Danlos | Collagen Type I, P02452\|CO1A1_HUMAN |
| Syndrome | Collagen alpha-1(I) chain, (SEQ ID NO: 487); |
| | P08123\|CO1A2_HUMAN Collagen alpha-2(I) |
| | chain, (SEQ ID NO: 488) |
| Epidermolysis | ADAM17, P78536\|ADA17_HUMAN |
| bullosa, lethal | Disintegrin and metalloproteinase domain- |
| acantholytic | containing protein 17, (isoform A), (SEQ ID |
| | NO: 502) |
| Epidermolysis | Collagen Type III, P02461\|CO3A1_HUMAN |
| bullosa, type IV | Collagen alpha-1(III) chain, (isoform 1), (SEQ ID |
| | NO: 489) |
| Erythropoietic | Ferrochelatase, P22830\|HEMH_HUMAN |
| Protoporphyria | Ferrochelatase, mitochondrial, (isoform 1), (SEQ |
| | ID NO: 503) |
| Eczema | Filaggrin |
| Excess Fat | Thermogenin, P25874\|UCP1_HUMAN |
| | Mitochondrial brown fat uncoupling protein 1, |
| | (SEQ ID NO: 504) |
| Excess Fat | Lipase; Lipoprotein lipase, P06858\|LIPL_ |
| | HUMAN Lipoprotein lipase, (SEQ ID NO: 516); |
| | Hepatic lipase, P11150\|LIPC_HUMAN Hepatic |
| | triacylglycerol lipase, (SEQ ID NO: 517); |
| | Pancreatic lipase, P16233\|LIPP_HUMAN |
| | Pancreatic triacylglycerol lipase, (SEQ ID NO: |
| | 518); Endothelial lipase, (isoform 1), |
| | Q9Y5X9\|LIPE_HUMAN Endothelial lipase, |
| | (SEQ ID NO: 519); Lysosomal lipase, |
| | P38571\|LICH_HUMAN Lysosomal acid lipase/ |
| | cholesteryl ester hydrolase, (isoform 1), |
| | (SEQ ID NO: 520); Hormone sensitive lipase, |
| | Q05469\|LIPS_HUMAN Hormone-sensitive lipas, |
| | (isoform 1), (SEQ ID NO: 521); Gastric lipase, |
| | P07098\|LIPG_HUMAN Gastric triacylglycerol |
| | lipase, (isoform 1), (SEQ ID NO: 522); Pancreatic |
| | Lipase-Related Protein 1), P54315\|LIPR1_ |
| | HUMAN Inactive pancreatic lipase-related protein |
| | 1, (isoform 1), (SEQ ID NO: 523); Pancreatic |
| | Lipase-Related Protein 2, P54317\|LIPR2_ |
| | HUMAN Pancreatic lipase-related protein 2, |
| | (SEQ ID NO: 524); Carboxyl Ester Lipase, |
| | P19835\|CEL_HUMAN Bile salt-activated lipase, |
| | (isoform long), (SEQ ID NO: 525) |
| Hypotrichosis | ADAM17, P78536\|ADA17_HUMAN Disintegrin |
| | and metalloproteinase domain-containing protein |
| | 17, (isoform A), (SEQ ID NO: 502) |
| Ichthyosis Vulgaris | Filaggrin |
| Infections | Genetic Antibiotics (e.g. Anti-Sigma Factors) |
| Inflammatory and | Desmoglein 2, Q14126\|DSG2_HUMAN |
| Bullous Skin Bowel | Desmoglein-2, (SEQ ID NO: 505) |
| Syndrome | |
| Keratosis Pilaris | Retinol Dehydrogenase 10 |
| Oily Skin | Retinol Dehydrogenase 10 |
| Osteoarthritis | Hyaluronan Synthase |
| Pemphigus Vulgaris | Plakophilin-1, Q13835\|PKP1_HUMAN |
| | Plakophilin-1, (isoform 2), (SEQ ID NO: 506) |
| Pseudoxanthoma | Elastin, sp\|P15502\|ELN_HUMAN Elastin, |
| elasticum | (isoform 3), (SEQ ID NO: 486) |
| Psoriasis | Retinol Dehydrogenase 10 |
| Scar Treatment | Tyrosinase, P14679\|TYRO_HUMAN Tyrosinase, |
| | (isoform 1), (SEQ ID NO: 491) |
| Scarring | Elastin, sp\|P15502\|ELN_HUMAN Elastin, |
| | (isoform 3), (SEQ ID NO: 486) |
| Scarring | Collagen Type 1, P02452\|CO1A1_HUMAN |
| | Collagen alpha-1(I) chain, (SEQ ID NO: 487); |
| | P08123\|CO1A2_HUMAN Collagen alpha-2(I) |
| | chain, (SEQ ID NO: 488) |
| Scarring | Collagen Type III, P02461\|CO3A1_HUMAN |
| | Collagen alpha-1(III) chain, (isoform 1), (SEQ ID |
| | NO: 489) |
| Skin Cancer | Interferon; Interferon, Alpha 1, P01562\|IFNA1_ |
| | HUMAN Interferon alpha-1/13, (SEQ ID NO: |
| | 530); Interferon, Alpha 2, P01563\|IFNA2_ |
| | HUMAN Interferon alpha-2, (SEQ ID NO: 531); |
| | Interferon, Alpha 4, P05014\|IFNA4_HUMAN |
| | Interferon alpha-4, (SEQ ID NO: 532); Interferon, |
| | Alpha 5, P01569\|IFNA5_HUMAN Interferon |
| | alpha-5, (SEQ ID NO: 533), Interferon, Alpha 6, |
| | P05013\|IFNA6_HUMAN Interferon alpha-6, |
| | (SEQ ID NO: 534); Interferon, Alpha 7, |
| | P01567\|IFNA7_HUMAN Interferon alpha-7, |
| | (SEQ ID NO: 535); Interferon, Alpha 8, |
| | P32881\|IFNA8_HUMAN Interferon alpha-8, |
| | (SEQ ID NO: 536); Interferon, Alpha 10, |
| | P01566\|IFN10_HUMAN Interferon alpha-10, |
| | (SEQ ID NO: 537); Interferon, Alpha 14, |
| | P01570\|IFN14_HUMAN Interferon alpha-14 OS, |
| | (SEQ ID NO: 538); Interferon, Alpha 16, |
| | P05015\|IFN16_HUMAN Interferon alpha-16, |
| | (SEQ ID NO: 539); Interferon, Alpha 17, |
| | P01571\|IFN17_HUMAN Interferon alpha-17, |
| | (SEQ ID NO: 540); Interferon, Alpha 21, |
| | P01568\|IFN21_HUMAN Interferon alpha-21, |
| | (SEQ ID NO: 541); Interferon, Gamma, |
| | P01579\|IFNG_HUMAN Interferon gamma, |
| | (SEQ ID NO: 542); Interferon, Beta, |
| | P01574\|IFNB_HUMAN Interferon beta, (SEQ ID |
| | NO: 543); Interferon, Kappa, Q9P0W0\|IFNK_ |
| | HUMAN Interferon kappa, (SEQ ID NO: 544); |
| | Interferon, Epsilon, Q86WN2\|IFNE_HUMAN |
| | Interferon epsilon, (SEQ ID NO: 545) |
| Striate | ADAM17, P78536\|ADA17_HUMAN Disintegrin |
| Palmoplantar | and metalloproteinase domain-containing protein |
| Keratoderma | 17, (isoform A), (SEQ ID NO: 502) |
| Tanning | Tyrosinase, P14679\|TYRO_HUMAN Tyrosinase, |
| | (isoform 1), (SEQ ID NO: 491) |
| Vitiligo | Melanocyte-Stimulating Hormone; Alpha-MSH, |
| | P01189\|138-150, (SEQ ID NO: 526);, Beta-MSH, |
| | P01189\|217-234, (SEQ ID NO: 527); Gamma- |
| | MSH, P01189\|77-87, (SEQ ID NO: 528); |
| | Proopiomelanocortin, P01189\|COLI_HUMAN |
| | Pro-opiomelanocortin, (SEQ ID NO: 529) |
| Vitiligo | Tyrosinase, P14679\|TYRO_HUMAN Tyrosinase, |
| | (isoform 1), (SEQ ID NO: 491) |
| Warts | Interferon; Interferon, Alpha 1, P01562\|IFNA1_ |
| | HUMAN Interferon alpha-1/13, (SEQ ID NO: |
| | 530); Interferon, Alpha 2, P01563\|IFNA2_ |
| | HUMAN Interferon alpha-2, (SEQ ID NO: 531); |
| | Interferon, Alpha 4, P05014\|IFNA4_HUMAN |
| | Interferon alpha-4, (SEQ ID NO: 532); Interferon, |
| | Alpha 5, P01569\|IFNA5_HUMAN Interferon |
| | alpha-5, (SEQ ID NO: 533), Interferon, Alpha 6, |
| | P05013\|IFNA6_HUMAN Interferon alpha-6, |
| | (SEQ ID NO: 534); Interferon, Alpha 7, |
| | P01567\|IFNA7_HUMAN Interferon alpha-7, |
| | (SEQ ID NO: 535); Interferon, Alpha 8, |
| | P32881\|IFNA8_HUMAN Interferon alpha-8, |
| | (SEQ ID NO: 536); Interferon, Alpha 10, |
| | P01566\|IFN10_HUMAN Interferon alpha-10, |
| | (SEQ ID NO: 537); Interferon, Alpha 14, |
| | P01570\|IFN14_HUMAN Interferon alpha-14 OS, |
| | (SEQ ID NO: 538); Interferon, Alpha 16, |
| | P05015\|IFN16_HUMAN Interferon alpha-16, |
| | (SEQ ID NO: 539); Interferon, Alpha 17, |
| | P01571\|IFN17_HUMAN Interferon alpha-17, |
| | (SEQ ID NO: 540); Interferon, Alpha 21, |
| | P01568\|IFN21_HUMAN Interferon alpha-21, |
| | (SEQ ID NO: 541); Interferon, Gamma, |
| | P01579\|IFNG_HUMAN Interferon gamma, |
| | (SEQ ID NO: 542); Interferon, Beta, |
| | P01574\|IFNB_HUMAN Interferon beta, (SEQ ID |
| | NO: 543); Interferon, Kappa, Q9P0W0\|IFNK_ |
| | HUMAN Interferon kappa, (SEQ ID NO: 544); |
| | Interferon, Epsilon, Q86WN2\|IFNE_HUMAN |
| | Interferon epsilon, (SEQ ID NO: 545) |
| Wound Healing | Elastin, sp\|P15502\|ELN_HUMAN Elastin, |
| | (isoform 3), (SEQ ID NO: 486) |
| Wound Healing | Collagen Type 1, P02452\|CO1A1_HUMAN |
| | Collagen alpha-1(I) chain, (SEQ ID NO: 487); |
| | P08123\|CO1A2_HUMAN Collagen alpha-2(I) |
| | chain, (SEQ ID NO: 488) |
| Wound Healing | Collagen Type III, P02461\|CO3A1_HUMAN |
| | Collagen alpha-1(III) chain, (isoform 1), (SEQ ID |
| | NO: 489) |
| Xeroderma | DNA Polymerase Eta, Q9Y253\|POLH_HUMAN |
| Pigmentosum | DNA polymerase eta, (isoform 1), (SEQ ID NO: |
| | 507) |

[0392] In Table 2B, all Illustrative Identifiers (e.g. Gene Seq nos. and references are hereby incorporated by reference in their entireties).

TABLE 2B
Illustrative Proteins and Illustrative Peptides
Protein/Peptide Illustrative Identifier Reference

Transthyretin (TTR), (SEQ ID NOs: 637 and 638), Gene ID: 7276
Endothelial Cell Specific Molecule 1, (SEQ ID NO: 784 and 785), Gene ID: 11082
Parathyroid hormone, P01270|PTHY_HUMAN Parathyroid hormone, (SEQ ID NO: 508)
BMP-1 GeneSeq Accession P80618 WO8800205, P13497/BMP1_HUMAN Bone morphogenetic protein 1, (isoform BMP1-3), (SEQ ID
NO: 169)
P13497-2|BMP1_HUMAN Isoform BMP1-1 of Bone morphogenetic protein 1, (isoform BMP1-1), (SEQ ID NO: 509)
P13497-3|BMP1_HUMAN Isoform BMP1-4 of Bone morphogenetic protein 1, (isoform BMP1-4), (SEQ ID NO: 510)
P13497-4|BMP1_HUMAN Isoform BMP1-5 of Bone morphogenetic protein 1, (isoform BMP1-5), (SEQ ID NO: 511)
P13497-5|BMP1_HUMAN Isoform BMP1-6 of Bone morphogenetic protein 1, (isoform BMP1-6), (SEQ ID NO: 512)
P13497-6|BMP1_HUMAN Isoform BMP1-7 of Bone morphogenetic protein 1, (isoform BMP1-7), (SEQ ID NO: 513)
BMP-2 GeneSeq Accession P80619 WO8800205, P12643/BMP2_HUMAN Bone morphogenetic protein 2, (SEQ ID NO: 170)
BMP-3, P12645|BMP3_HUMAN Bone morphogenetic protein 3, (SEQ ID NO: 514)
BMP-2B GeneSeq Accession W24850 U.S. Pat. No. 5,631,142, P12644/BMP4_HUMAN Bone morphogenetic protein 4, (SEQ ID NO: 171)
BMP-4 GeneSeq Accession B02796 WO0020591, P12644/BMP4_HUMAN Bone morphogenetic protein 4, (SEQ ID NO: 172)
BMP-5 GeneSeq Accession B02797 WO0020591, P22003/BMP5_HUMAN Bone morphogenetic protein 5, (isoform 1), (SEQ ID NO: 173)
P22003-2|BMP5_HUMAN Isoform 2 of Bone morphogenetic protein 5, (isoform 2), (SEQ ID NO: 515)
BMP-6 GeneSeq Accession R32904 U.S. Pat. No. 5,187,076, P22004/BMP6_HUMAN Bone morphogenetic protein 6, (SEQ ID NO: 174)
Osteogenic Protein-1; OP-1; BMP-7 GeneSeq Accession W34783 WO973462, P18075/BMP7_HUMAN Bone morphogenetic protein 7,
(SEQ ID NO: 175)
BMP7 Variant A, (SEQ ID NO: 579)
BMP7 Variant B, (SEQ ID NO: 580)
BMP7 Variant C, (SEQ ID NO: 581)
Osteogenic Protein-2 GeneSeq Accession R57973 WO9406399, P34820/BMP8B_HUMAN Bone morphogenetic protein 8B, (SEQ ID NO:
176)
GDF-1 GeneSeq Accession R60961 WO9406449, P27539/GDF1_HUMAN Embryonic growth/differentiation factor 1, (SEQ ID NO: 177)
BMP-9 GeneSeq Accession R86903 WO9533830, Q9UK05/GDF2_HUMAN Growth/differentiation factor 2, (SEQ ID NO: 178)
BMP-10 GeneSeq Accession R66202 WO9426893, O95393/BMP10_HUMAN Bone morphogenetic protein 10, (SEQ ID NO: 179)
BMP-12 GeneSeq Accession R78734 WO9516035, Q7Z4P5/GDF7_HUMAN Growth/differentiation factor 7, (SEQ ID NO: 180)
BMP-15 GeneSeq Accession W11261 W09636710, O95972/BMP15_HUMAN Bone morphogenetic protein 15, (SEQ ID NO: 181)
BMP-17 GeneSeq Accession Y17870 WO9929718, SEQ ID NO: 2 from U.S. Pat. No. 7,151,086, (SEQ ID NO: 182)
BMP-18 GeneSeq Accession Y17871 WO9929718, SEQ ID NO: 4 from U.S. Pat. No. 7,151,086, (SEQ ID NO: 183)
Inhibin alpha GeneSeq Accession B02806 WO0020591, P05111/INHA_HUMAN Inhibin alpha chain, (SEQ ID NO: 184)
Inhibin beta GeneSeq Accession H02808 WO0020591, P08476/INHBA_HUMAN Inhibin beta A chain, (SEQ ID NO: 185)
P09529/INHBB_HUMAN Inhibin beta B chain, (SEQ ID NO: 186)
Cerberus Protein GeneSeq Accession W86032 WO9849296, O95813/CER1_HUMAN Cerberus, (SEQ ID NO: 187)
Soluble BMP Receptor Kinase Protein- 3 GeneSeq Accession R95227 WO9614579, Q13873/BMPR2_HUMAN Bone morphogenetic
proteinreceptor type-2, (SEQ ID NO: 188)
BMP Processing Enzyme Furin GeneSeq Accession W36099 WO9741250, P09958/FURIN_HUMAN Furin, (SEQ ID NO: 189)
TGF-beta 1 GeneSeq Accession R29657 WO9216228, P01137/TGFB1_HUMAN Transforming growth factor beta-1, (SEQ ID NO: 190)
TGF-beta 2 GeneSeq Accession R39659 EP542679, P61812/TGFB2_HUMAN Transforming growth factor beta-2, (SEQ ID NO: 191)
ZTGF-beta 9 GeneSeq Accession Y70654 WO0015798, SEQ ID NO: 2 of WO0015798, (SEQ ID NO: 192)
Anti-TGF beta family antibodies GB2305921
Latent TGF beta binding protein II GeneSeq Accession Y70552 WO0012551, Q14767/LTBP2_HUMAN Latent-transforming growth
factor beta-binding protein 2, (SEQ ID NO: 193)
MP52 GeneSeq Accession W36100 WO9741250, P43026/GDF5_HUMAN Growth/differentiation factor 5, (SEQ ID NO: 194)
b57 Protein GeneSeq Accession W69293 WO9837195, SEQ ID NO: 2 of WO9837195, (SEQ ID NO: 195)
Resistin GeneSeq Accession W69293 WO0064920, Q9HD89/RETN_HUMAN Resistin, (isoform 1), (SEQ ID NO: 196)
Galectin-4 GeneSeq Accession W11841 WO9703190, P56470/LEG4_HUMAN Galectin-4, (SEQ ID NO: 197)
APM-I; ACRP- 30; Famoxin GeneSeq Accession Y71035 W00026363, Q15848/ADIPO_HUMAN Adiponectin, (SEQ ID NO: 198)
ACRP-30 Homologue; Complement Component Clq C GeneSeq Accession B30234 WO0063376, P02747/C1QC_HUMAN Complement
C1q subcomponent subunit C, (SEQ ID NO: 199)
Calpain-10a GeneSeq Accession Y79567 WO0023603, Q9HC96/CAN10_HUMAN Calpain-10, (isoform A), (SEQ ID NO: 200)
Calpain-10b GeneSeq Accession Y79568 WO0023603, Q9HC96-2/CAN10_HUMAN Isoform B of Calpain-10, (SEQ ID NO: 201)
Calpain-10c GeneSeq Accession Y79569 WO0023603, Q9HC96-3/CAN10_HUMAN Isoform C of Calpain-10, (SEQ ID NO: 202)
PDGF-D GeneSeq Accession Y71130 WO0027879, Q9GZP0/PDGFD_HUMAN Platelet-derived growth factor D, (isoform 1), (SEQ ID NO:
203)
FasL GeneSeq Accession Y28594 WO9936079, P48023/TNFL6_HUMAN Tumor necrosis factor ligand superfamily member 6, (isoform 1),
(SEQ ID NO: 204)
Chondro modulin-like protein GeneSeq Accession Y71262 WO0029579, SEQ ID NO: 2 from WO0029579, (SEQ ID NO: 370)
Patched GeneSeq Accession W72969 U.S. Pat. No. 5,837,538, Q13635/PTC1_HUMAN Protein patched homolog 1, (isoform L), (SEQ ID
NO: 205)
Patched-2 GeneSeq Accession Y43261 WO9953058, Q9Y6C5/PTC2_HUMAN Protein patched homolog 2, (isoform 1), (SEQ ID NO: 206)
Maspin; Protease Inhibitor 5 GeneSeq Accession R50938 WO9405804, P36952/SPB5_HUMAN Serpin B5, (isoform 1), (SEQ ID NO: 207)
Endostatin GeneSeq Accession B28399 WO0064946, P39060/COIA1_HUMAN Collagen alpha-1(XVIII) chain, (isoform 1), (SEQ ID NO:
208)
aFGF; FGF-1 GeneSeq Accession P94037 EP298723, P05230/FGF1_HUMAN Fibroblast growth factor 1, (isoform 1), (SEQ ID NO: 209)
bFGF; FGF-2 GeneSeq Accession R06685 FR2642086, P09038/FGF2_HUMAN Fibroblast growth factor 2, (isoform 1), (SEQ ID NO: 210)
FGF-3; INT-2 GeneSeq Accession R07824 WO9503831, P11487/FGF3_HUMAN Fibroblast growth factor 3, (SEQ ID NO: 211)
FGF-4; HST-1; HBGF-4 GeneSeq Accession R07825 WO9503831, P08620/FGF4_HUMAN Fibroblast growth factor 4, (isoform 1), (SEQ
ID NO: 212)
FGF-5 GeneSeq Accession W22600 WO9730155, P12034/FGF5_HUMAN Fibroblast growth factor 5, (isoform long), (SEQ ID NO: 213)
FGF-6; Heparin binding secreted transforming factor-2 GeneSeq Accession R58555 EP613946, P10767/FGF6_HUMAN Fibroblast growth
factor 6, (SEQ ID NO: 214)
FGF-8 GeneSeq Accession R80783 WO9524928, P55075/FGF8_HUMAN Fibroblast growth factor 8, (isoform 8E), (SEQ ID NO: 215)
FGF-9; Gila activating factor GeneSeq Accession R70822 WO9503831, P31371/FGF9_HUMAN Fibroblast growth factor 9, (SEQ ID NO:
216)
FGF-12; Fibroblast growth factor homologous factor-1 GeneSeq Accession W06309 WO9635708, P61328/FGF12_HUMAN Fibroblast
growth factor 12, (isoform 1), (SEQ ID NO: 217)
FGF-19 GeneSeq Accession Y08582 WO9927100, O95750/FGF19_HUMAN Fibroblast growth factor 19, (SEQ ID NO: 218)
FGF-16 GeneSeq Accession Y05474 WO9918128, O43320/FGF16_HUMAN Fibroblast growth factor 16, (SEQ ID NO: 219)
FGF-18 GeneSeq Accession Y08590 WO9927100, O76093/FGF18_HUMAN Fibroblast growth factor 18, (SEQ ID NO: 220)
flt-3 ligand GeneSeq Accession R67541 EP627487, P49771|FLT3L_HUMAN Fms-related tyrosine kinase 3 ligand, (isoform 1), (SEQ ID
NO: 221)
VEGF-110 GeneSeq Accession Y69417 WO0013702, SEQ ID NO: 11 from WO0013702, (SEQ ID NO: 222)
VEGF-121 GeneSeq Accession B50432 WO0071713, SEQ ID NO: 2 from WO0071713, (SEQ ID NO: 223)
VEGF-138 GeneSeq Accession Y43483 WO9940197, SEQ ID NO: 4 of WO99/40197, (SEQ ID NO: 371)
VEGF-145 GeneSeq Accession Y69413 WO0013702, SEQ ID NO: 4 from WO0013702, (SEQ ID NO: 224)
VEGF-162 GeneSeq Accession Y43484 W09940197, SEQ ID NO: 8 of WO99/40197, (SEQ ID NO: 372)
VEGF-165 GeneSeq Accession Y69414 WO0013702, SEQ ID NO: 6 from WO0013702, (SEQ ID NO: 225)
VEGF-182 GeneSeq Accession Y43483 W09940197, SEQ ID NO: 6 of WO99/40197, (SEQ ID NO: 373)
VEGF-189 GeneSeq Accession Y69415 WO0013702, SEQ ID NO: 8 from WO0013702, (SEQ ID NO: 226)
VEGF-206 GeneSeq Accession Y69416 W00013702, SEQ ID NO: 10 from WO0013702, (SEQ ID NO: 227)
VEGF-D GeneSeq Accession W53240 WO9807832, O43915/VEGFD_HUMAN Vascular endothelial growth factor D, (SEQ ID NO: 374)
VEGF-E; VEGF-X GeneSeq Accession Y33679 WO9947677, SEQ ID NO: 2 from WO9947677, (SEQ ID NO: 228)
VEGF Receptor; KDR; flk-1 GeneSeq Accession W69679 WO9831794, P35968/VGFR2_HUMAN Vascular endothelial growth factor
receptor 2, (isoform 1), (SEQ ID NO: 229)
Soluble VEGF Receptor GeneSeq Accession W47037 U.S. Pat. No. 5,712,380; sVEGF-RI (FIG. 3) of U.S. Pat. No. 5,712,380, (SEQ ID
NO: 442); sVEGF-RII (FIG. 11) of U.S. Pat. No. 5,712,380, (SEQ ID NO: 443); sVEGF-RTMI (FIG. 15) of U.S. Pat. No. 5,712,380,
(SEQ ID NO: 444); sVEGF-RTMII (FIG. 13) of U.S. Pat. No. 5,712,380, (SEQ ID NO: 445)
flt-1 GeneSeq Accession Y70751 WO0021560, P17948/VGFR1_HUMAN Vascular endothelial growth factor receptor 1, (isoform 1), (SEQ
ID NO: 230)
VEGF R-3; flt-4 GeneSeq Accession B29047 WO0058511, P35916/VGFR3_HUMAN Vascular endothelial growth factor receptor 3,
(isoform 1), (SEQ ID NO: 231)
Neuropilin-1 GeneSeq Accession Y06319 WO9929858, O14786/NRP1_HUMAN Neuropilin-1, (isoform 1), (SEQ ID NO: 232)
Neuropilin-2 GeneSeq Accession Y03618 WO9929858, O60462/NRP2_HUMAN Neuropilin-2, (isoform A22), (SEQ ID NO: 233)
Human fast twitch skeletal muscle troponin C GeneSeq Accession W22597 W09730085, P02585/TNNC2_HUMAN Troponin C, skeletal
muscle, (SEQ ID NO: 234)
Human fast twitch skeletal muscle troponin I GeneSeq Accession W18054 W09730085, P48788/TNNI2_HUMAN Troponin 1, fast skeletal
muscle, (isoform 1), (SEQ ID NO: 235)
Human fast twitch skeletal muscle troponin T GeneSeq Accession W22599 W09730085, SEQ ID NO: 3 of WO9730085, (SEQ ID NO: 236)
Fragment. myofibrillar protein troponin I GeneSeq Accession W18053 W09719955, SEQ ID NO: 3 of WO9719955, (SEQ ID NO: 237)
myofibrillar protein troponin I GeneSeq Accession W18054 WO9719955, SEQ ID NO: 3 of WO9719955, (SEQ ID NO: 237)
Troponin peptides GeneSeq Accessions Y29581, Y29582, Y29583, Y29584, Y29585, and Y29586 WO9933874. Wildtype troponins provided
as: Human fast twitch skeletal muscle troponin C GeneSeq Accession W22597 W09730085, P02585/TNNC2_HUMAN Troponin C, skeletal
muscle, (SEQ ID NO: 234); Human fast twitch skeletal muscle troponin I GeneSeq Accession W18054 W09730085, P48788/TNNI2_HUMAN
Troponin I, fast skeletal muscle, (isoform 1), (SEQ ID NO: 235); Human fast twitch skeletal muscle troponin T GeneSeq Accession W22599
W09730085, SEQ ID NO: 3 of WO9730085, (SEQ ID NO: 236); fragment. myofibrillar protein troponin I GeneSeq Accession W18053 W09719955,
SEQ ID NO: 3 of WO9719955, (SEQ ID NO: 237); Human fast twitch skeletal muscle Troponin subunit C GeneSeq Accession B00134 WO0054770,
SEQ ID NO: 1 of WO0054770, (SEQ ID NO: 375); Human fast twitch skeletal muscle Troponin subunit I Protein GeneSeq Accession B00135
WO0054770, SEQ ID NO: 2 of WO0054770, (SEQ ID NO: 376); Human fast twitch skeletal muscle Troponin subunit T GeneSeq Accession
B00136 WO0054770, SEQ ID NO: 3 of WO0054770, (SEQ ID NO: 377)
Human fast twitch skeletal muscle Troponin subunit C GeneSeq Accession B00134 WO0054770, SEQ ID NO: 1 of WO0054770, (SEQ ID
NO: 375)
Human fast twitch skeletal muscle Troponin subunit I Protein GeneSeq Accession B00135 WO0054770, SEQ ID NO: 2 of WO0054770,
(SEQ ID NO: 376)
Human fast twitch skeletal muscle Troponin subunit T GeneSeq Accession B00136 WO0054770, SEQ ID NO: 3 of WO0054770, (SEQ ID
NO: 377)
Activator lnbibitor-1; PAI-1 GeneSeq Accession R08411 WO9013648, P05121/PAI1_HUMAN Plasminogen activator inhibitor 1, (isoform
1), (SEQ ID NO: 238)
Plasminogen Activator Inhibitor-2; PAI-2 GeneSeq Accession P94160 DE3722673, P05120/PAI2_HUMAN Plasminogen activator inhibitor
2, (SEQ ID NO: 239)
Activator Inhibitor-2; PAI-2 GeneSeq Accession R10921 WO9102057, P05120/PAI2_HUMAN Plasminogen activator inhibitor 2, (SEQ ID
NO: 239)
Human PAI-1 mutants GeneSeq Accessions R11755, R11756, R11757, R11758, R11759, R11760, R11761, R11762 and R11763
WO9105048, Wildtype PAI-1 is provided as P05121/PAI1_HUMAN Plasminogen activator inhibitor 1, (isoform 1), (SEQ ID NO: 238)
CXCR3; CXC GeneSeq Accession Y79372 WO0018431, P49682|CXCR3_HUMAN C-X-C chemokine receptor type 3, (isoform 1),
(SEQ ID NO: 240)
Modified Rantes GeneSeq Accession W38129 WO9737005, Wildtype Rantes provided herein as P13501/CCL5_HUMAN C-C motif
chemokine 5, (SEQ ID NO: 241)
RANTES GeneSeq Accession Y05299 EP905240, P13501/CCL5_HUMAN C-C motif chemokine 5, (SEQ ID NO: 241)
MCP-Ia GeneSeq Accession R73914 WO9509232, MCP-1 provided as P13500/CCL2_HUMAN C-C motif chemokine 2, (SEQ ID NO: 337)
MCP-Ib GeneSeq Accession Y26176 WO9929728, MCP-1 provided as P13500/CCL2_HUMAN C-C motif chemokine 2, (SEQ ID NO:
337)
MCP-I receptor GeneSeq Accession R79165 WO9519436: MCP-1A, SEQ ID NO: 2 of WO9519436, (SEQ ID NO: 446); MCP-1B, SEQ ID
NO: 4 of WO9519436, (SEQ ID NO: 447)
MCP-3 GeneSeq Accession R73915 W09509232, P80098/CCL7_HUMAN C-C motif chemokine 7, (SEQ ID NO: 336)
MCP-4 receptor GeneSeq Accession W56689 WO9809171, SEQ ID NO: 2 of WO9809171, (SEQ ID NO: 378)
RANTES receptor GeneSeq Accession W29588 U.S. Pat. No. 5,652,133, SEQ ID NO: 2 of U.S. Pat. No. 5,652,133, (SEQ ID NO: 379)
CR5 variant GeneSeq Accession W88238 WO9854317, Variants of wildtype CCR5 which has the sequence, of: P51681|CCR5_HUMAN
C-C chemokine receptor type 5, (SEQ ID NO: 448)
CCR7 GeneSeq Accession B50859 U.S. Pat. No. 6,153,441, P32248/CCR7_HUMAN C-C chemokine receptor type 7, (SEQ ID NO: 243)
CXC3 GeneSeq Accession W23345 WO9727299, P78423/X3CL1_HUMAN Fractalkine, (SEQ ID NO: 244)
Eotaxin GeneSeq Accession W10099 WO9700960, P51671/CCL11_HUMAN Eotaxin, (SEQ ID NO: 245)
Neurotactin GeneSeq Accessions Y77537, W34307, Y53259, and, Y77539 U.S. Pat. No. 6,013,257 WO9742224, P78423/X3CL1_HUMAN
Fractalkine, (SEQ ID NO: 244)
Human CKbeta-9 GeneSeq Accession B50860 U.S. Pat. No. 6,153,441, SEQ ID NO: 2 of U.S. Pat. No. 6,153,441, (SEQ ID NO: 246)
Lymphotactin GeneSeq Accession B50052 WO0073320, P47992/XCL1_HUMAN Lymphotactin, (SEQ ID NO: 247)
MIP-3 alpha GeneSeq Accession W44398 WO9801557, P78556/CCL20_HUMAN C-C motif chemokine 20, (isoform 1), (SEQ ID NO: 248)
MIP-3 beta GeneSeq Accession W44399 WO9801557, Q99731/CCL19_HUMAN C-C motif chemokine 19, (SEQ ID NO: 249)
MIP-Gamma GeneSeq Accession R70798, WO2006135382, (SEQ ID NO: 457)
Stem Cell Inhibitory Factor GeneSeq Accession R11553 WO9104274, SCIF in Table I of WO9104274, (SEQ ID NO: 380); SCIF in Table II
of WO9104274, (SEQ ID NO: 381)
Thrombopoietin GeneSeq Accession R79905 WO9521920, P40225|TPO_HUMAN Thrombopoietin, (isoform 1), (SEQ ID NO: 250)
c-kit ligand; SCF; Mast cell growth factor; MGF; Fibrosarcoma- derived stem cell factor GeneSeq Accession Y53284, R83978 and R83977
EP992579 and EP676470, P21583|SCF_HUMAN Kit ligand, (isoform 1), (SEQ ID NO: 251)
Platelet derived growth factor GeneSeq Accession B48653 WO0066736, PDGF-A, P04085/PDGFA_HUMAN Platelet-derived growth factor
subunit A, (Isoform long), (SEQ ID NO: 257); PDGF-B, P01127/PDGFB_HUMAN Platelet-derived growth factor subunit B, (isoform 1),
(SEQ ID NO: 258)
Melanoma inhibiting protein GeneSeq Accession R69811 WO9503328, (SEQ ID NO: 458)
Glioma-derived growth factor GeneSeq Accession R08120 EP399816
Platelet derived growth factor precursor A GeneSeq Accession R84759 EP682110, PDGF-A precursor (variant D1), (SEQ ID NO: 382);
PDGF-A precursor (variant 13-1), (SEQ ID NO: 383)
Platelet derived growth factor precursor B GeneSeq Accession R84760 EP682110, FIG. 1 or FIG. 2, Wildtype PDGF-B provided as:,
PDGF-B, P01127/PDGFB_HUMAN Platelet-derived growth factor subunit B, (isoform 1), (SEQ ID NO: 258)
Platelet derived growth factor Bvsis GeneSeq Accession P80595 and P80596 EP282317, FIG. 1 of EP282317, (SEQ ID NO: 384)
Placental Growth Factor GeneSeq Accessions R23059 and R23060 WO9206194, P49763-2/PLGF_HUMAN Isoform PIGF-1 of Placenta
growth factor, (isoform PIGF-1), (SEQ ID NO: 252)
Placental Growth Factor- 2 GeneSeq Accession Y08289 DE19748734, P49763-3/PLGF_HUMAN Isoform PIGF-2 of Placenta growth factor,
(isoform PIGF-2), (SEQ ID NO: 253)
Thrombopoietin derivative1 GeneSeq Accession Y77244 WO0000612 (e.g. Table 3), Wildtype thrombopoietin provided as:,
P40225|TPO_HUMAN Thrombopoietin, (isoform 1), (SEQ ID NO: 250)
Thrombopoietin derivative2 GeneSeq Accession Y77255 WO0000612 (e.g. Table 3), Wildtype thrombopoietin provided as:,
P40225|TPO_HUMAN Thrombopoietin, (isoform 1), (SEQ ID NO: 250)
Thrombopoietin derivative 3 GeneSeq Accession Y77262, WO0000612 (e.g. Table 3), Wildtype thrombopoietin provided as:,
P40225|TPO_HUMAN Thrombopoietin, (isoform 1), (SEQ ID NO: 250)
Thrombopoietin derivative 4 GeneSeq Accession Y77267, WO0000612 (e.g. Table 3), Wildtype thrombopoietin provided as:,
P40225|TPO_HUMAN Thrombopoietin, (isoform 1), (SEQ ID NO: 250)
Thrombopoietin derivative 5 GeneSeq Accession Y77246, WO0000612 (e.g. Table 3), Wildtype thrombopoietin provided as:,
P40225|TPO_HUMAN Thrombopoietin, (isoform 1), (SEQ ID NO: 250)
Thrombopoietin derivative 6 GeneSeq Accession Y77253, WO0000612 (e.g. Table 3), Wildtype thrombopoietin provided as:,
P40225|TPO_HUMAN Thrombopoietin, (isoform 1), (SEQ ID NO: 250)
Thrombopoietin derivative, 7 GeneSeq Accession Y77256, WO0000612 (e.g. Table 3), Wildtype thrombopoietin provided as:,
P40225|TPO_HUMAN Thrombopoietin, (isoform 1), (SEQ ID NO: 250)
Fractalkine GeneSeq Accession Y53255 U.S. Pat. No. 6,043,086, P78423/X3CL1_HUMAN Fractalkine, (SEQ ID NO: 244)
CXC3 GeneSeq Accession W23345 WO9757599, P78423/X3CL1_HUMAN Fractalkine, (SEQ ID NO: 244)
CCR7 GeneSeq Accession B50859 U.S. Pat. No. 6,153,441, P32248/CCR7_HUMAN C-C chemokine receptor type 7, (SEQ ID NO: 243)
Nerve Growth Factor-beta GeneSeq Accession R11474 EP414151, P01138/NGF_HUMAN Beta-nerve growth factor, (SEQ ID NO: 254)
Nerve Growth Factor-beta2 GeneSeq Accession W69725 EP859056, FIG. 1 of EP859056, (SEQ ID NO: 465)
Neurotrophin-3 GeneSeq Accession W8889 WO9821234, P20783/NTF3_HUMAN Neurotrophin-3, (isoform 1), (SEQ ID NO: 255)
Neurotrophin-4 GeneSeq Accession R47100 WO9325684, P34130/NTF4_HUMAN Neurotrophin-4, (SEQ ID NO: 256)
Neurotrophin- 4a GeneSeq Accession R47101 WO9325684, Wildtype neurotrophin provided as:, P34130/NTF4_HUMAN Neurotrophin-4,
(SEQ ID NO: 256)
Neurotrophin- 4b GeneSeq Accession R47102 WO9325684, P34130/NTF4_HUMAN Neurotrophin-4, (SEQ ID NO: 256)
Neurotrophin- 4c GeneSeq Accession R47103 WO9325684, P34130/NTF4_HUMAN Neurotrophin-4, (SEQ ID NO: 256)
Neurotrophin- 4d GeneSeq Accession R47102 WO9325684, P34130/NTF4_HUMAN Neurotrophin-4, (SEQ ID NO: 256)
Platelet-Derived Growth Factor A chain GeneSeq Accession R38918 U.S. Pat. No. 5,219,739, P04085/PDGFA_HUMAN Platelet-derived
growth factor subunit A, (Isoform long), (SEQ ID NO: 257)
Platelet-Derived Growth Factor B chain GeneSeq Accession R38919 U.S. Pat. No. 5,219,739, P01127/PDGFB_HUMAN Platelet-derived
growth factor subunit B, (isoform 1), (SEQ ID NO: 258)
Stromal Derived Factor- 1 alpha GeneSeq Accession Y39995 WO9948528, P48061-2/SDF1_HUMAN Isoform Alpha of Stromal cell-
derived factor 1, (isoform alpha), (SEQ ID NO: 259)
Stromal Derived Factor- 1 beta GeneSeq Accession R75420 CA2117953, P48061/SDF1_HUMAN Stromal cell-derived factor 1, (isoform
beta), (SEQ ID NO: 260)
Tarc GeneSeq Accession W14917 WO9711969, Q92583/CCL17_HUMAN C-C motif chemokine 17, (SEQ ID NO: 261)
Prolactin GeneSeq Accession R78691 WO9521625, P01236/PRL_HUMAN Prolactin, (SEQ ID NO: 262)
Prolactin2 GeneSeq Accession Y31764 U.S. Pat. No. 5,955,346
Follicle stimulating hormone Alpha subunit GeneSeq Accession Y54160 EP974359, P01215/GLHA_HUMAN Glycoprotein hormones
alpha chain, (SEQ ID NO: 263)
Follicle stimulating hormone Beta subunit GeneSeq Accession Y54161 EP974359, P01225/FSHB_HUMAN Follitropin subunit beta,
(SEQ ID NO: 264)
Substance P (tachykinin) GeneSeq Accession B23027 WO0054053, (SEQ ID NO: 385)
Oxytocin (Neurophysin I) GeneSeq Accession B24085 and B24086 WO0053755, P01178/NEU1_HUMAN Oxytocin-neurophysin 1,
(SEQ ID NO: 265)
Vasopressin (Neurophysin II) GeneSeq Accession B24085 and B24086 WO0053755, P01185/NEU2_HUMAN Vasopressin-neurophysin
2-copeptin, (SEQ ID NO: 266)
IL-1 GeneSeq Accession P60326 EP165654, IL-1 alpha, P01583|IL1A_HUMAN Interleukin-1 alpha, (SEQ ID NO: 269); IL-1 beta,
P01584|IL1B_HUMAN Interleukin-1 beta, (SEQ ID NO: 267)
IL-1 mature GeneSeq Accession R14855 EP456332, (mature truncated form wherein the precursor is cleaved between amino acids 116-
117), (SEQ ID NO: 386)
IL-1 beta GeneSeq Accession Y08322 WO9922763, P01584|IL1B_HUMAN Interleukin-1 beta, (SEQ ID NO: 267)
IL-3 variants GeneSeq Accession P80382, P80383, P80384, and P80381 WO8806161, Variants of wildtype IL-3 which has the sequence:,
P08700|IL3_HUMAN Interleukin-3, (SEQ ID NO: 449)
IL-4 GeneSeq Accession P70615 WO8702990, P05112/IL4_HUMAN Interleukin-4, (isoform 1), (SEQ ID NO: 268)
IL-4 muteins GeneSeq Accession W52151 W52152 W52153 W52154 W52155 W52156 W52157 W52158 W52159 W52160 W52161
W52162 W52163 W52164 and W52165 WO9747744, Variants of wildtype IL-4 which has the sequence:, P05112/IL4_HUMAN
Interleukin-4, (isoform 1), (SEQ ID NO: 268)
IL-1 alpha GeneSeq Accession P90108 EP324447, P01583|IL1A_HUMAN Interleukin-1 alpha, (SEQ ID NO: 269)
IL-3 variants GeneSeq Accession R38561, R38562, R38563, R38564, R38565, R38566, R38567, R38568, R38569, R38570, R38571, and
R38572 WO9307171, Variants of wildtype IL-3 which has the sequence:, P08700|1L3_HUMAN Interleukin-3, (SEQ ID NO: 449)
IL-6 GeneSeq Accession R45717 and R45718 WO9402512, P05231/IL6_HUMAN Interleukin-6, (SEQ ID NO: 270)
IL-13 GeneSeq Accession R48624 WO9404680, P35225/IL13_HUMAN Interleukin-13, (SEQ ID NO: 271)
IL-4 mutein GeneSeq Accession R47182 DE4137333, Variants of wildtype IL-4 which has the sequence:, P05112/IL4_HUMAN
Interleukin-4, (isoform 1), (SEQ ID NO: 268)
IL-4 mutein Y124X GeneSeq Accession R47183 DE4137333, Variants of wildtype IL-4 which has the sequence:, P05112/IL4_HUMAN
Interleukin-4, (isoform 1), (SEQ ID NO: 268))
IL-4 mutein Y124G GeneSeq Accession R47184 DE4137333, Variants of wildtype IL-4 which has the sequence:, P05112/IL4_HUMAN
Interleukin-4, (isoform 1), (SEQ ID NO: 268)
Human Interleukin-10 (precursor) GeneSeq Accession R41664 WO9317698, P22301/IL10_HUMAN Interleukin-10, (precursor form is
processed into a truncated mature form), (SEQ ID NO: 272)
Human Interleukin-10 GeneSeq Accession R42642 WO9318783-A, SEQ ID NO: 3 of WO9318783-A, (mature IL-10), (SEQ ID NO: 273)
Human interleukin-1 beta precursor. GeneSeq Accession R42447 EP569042, P01584/IL1B_HUMAN Interleukin-1 beta, (SEQ ID NO: 274)
Interleukin- 1alpha GeneSeq Accession R45364 EP578278, P01583|IL1A_HUMAN Interleukin-1 alpha, (SEQ ID NO: 269)
Human interleukin-3 variant GeneSeq Accession R22814 JP04063595, Variants of wildtype IL-3 which has the sequence:,
P08700|IL3_HUMAN Interleukin-3, (SEQ ID NO: 449)
IL-1i fragments GeneSeq Accession R35484 and R35485 EP541920
IL-1 inhibitor (IL-li) GeneSeq Accession R35486 and R35484 EP5541920
ICE 22 kD subunit. GeneSeq Accession R33780 EP533350, SEQ ID NO: 16 of EP533350, (SEQ ID NO: 450)
ICE 20 kD subunit. GeneSeq Accession R33781 EP533350, SEQ ID NO: 17 of EP533350, (SEQ ID NO: 451)
ICE 10 kD subunit GeneSeq Accession R33782 EP533350, SEQ ID NO: 18 of EP533350, (SEQ ID NO: 452)
Human Interleukin-10 (precursor) GeneSeq Accession R41664 WO9317698, P22301/IL10_HUMAN Interleukin-10, (precursor form is
processed into a truncated mature form), (SEQ ID NO: 272)
Human Interleukin-10 GeneSeq Accession R42642 WO9318783, SEQ ID NO: 3 of WO9318783-A, (mature IL-10), (SEQ ID NO: 273)
Human Interleukin-1 beta precursor GeneSeq Accession R42447 EP569042, P01584/IL1B_HUMAN Interleukin-1 beta, (SEQ ID NO: 274)
Human interleukin-6 GeneSeq Accession R49041 WO9403492, P05231/IL6_HUMAN Interleukin-6, (SEQ ID NO: 270)
Mutant Interleukin 6 S176R GeneSeq Accession R54990 WO9411402, S176R variant of wildtype IL-6 which has the sequence:,
P05231/IL6_HUMAN Interleukin-6, (SEQ ID NO: 270)
Interleukin 6 GeneSeq Accession R55256 JP06145063, P05231/IL6_HUMAN Interleukin-6, (SEQ ID NO: 270)
Interleukin 8 (IL-8) receptor GeneSeq Accession R53932 JP06100595, GenBank: AAA59159.1, (SEQ ID NO: 275)
Human interleukin-7 GeneSeq Accession R59919 U.S. Pat. No. 5,328,988, P13232/IL7_HUMAN Interleukin-7, (isoform 1), (SEQ ID NO:
276)
IL-3 containing fusion protein. GeneSeq Accession R79342 and R79344 WO9521254, Fusions of wildtype IL-3 which has the sequence:,
P08700|IL3_HUMAN Interleukin-3, (SEQ ID NO: 449)
IL-3 mutant proteins GeneSeq Accession R79254, R79255, R79256, R79257, R79258, R79259, R79260, R79261, R79262, R79263,
R79264, R79265, R79266, R79267, R79268, R79269, R79270, R79271, R79272, R79273, R79274, R79275, R79276, R79277, R79278,
R79279, R79280, R79281, R79282, R79283, R79284, and R79285 ZA9402636, Variants of wildtype IL-3 which has the sequence:,
P08700|IL3_HUMAN Interleukin-3, (SEQ ID NO: 449)
IL-12 p40 subunit. GeneSeq Accession R63018 AU9466072, P2946/|IL12B_HUMAN Interleukin-12 subunit beta, (SEQ ID NO: 277)
ANGPTL3 Angiopoietin-like 3 GeneSeq Accession EAX06583.1 (SEQ ID NO: 859)
AGF GeneSeq Accession R64240 WO9429344, Q8NI99/ANGL6_HUMAN Angiopoietin-related protein 6, (SEQ ID NO: 278)
Human interlaukin-12 40 kD subunit GeneSeq Accession R79187 WO9519786, P2946/|IL12B_HUMAN Interleukin-12 subunit beta, (SEQ
ID NO: 277)
Human interleukin-15 receptor from clone P1 GeneSeq Accession R90843 WO9530695, Q13261|I15RA_HUMAN Interleukin-15 receptor
subunit alpha, Isoform 1), (SEQ IDNO: 453)
Human interleukin-7 GeneSeq Accession R92796 WO9604306, P13232/IL7_HUMAN Interleukin-7, (isoform 1), (SEQ ID NO: 276)
interleukin-9 GeneSeq Accession R92797 WO9604306, P15248/IL9_HUMAN Interleukin-9, (SEQ ID NO: 279)
interleukin-3 GeneSeq Accession R92801 WO9604306, P08700|IL3_HUMAN Interleukin-3, (SEQ ID NO: 280)
Human interleukin-5 GeneSeq Accession R92802 WO9604306, P05113/IL5_HUMAN Interleukin-5, (SEQ ID NO: 281)
Recombinant interleukin-16 GeneSeq Accession W33373 DE19617202, Q14005/IL16_HUMAN Pro-interleukin-16, (isoform 1), (SEQ ID
NO: 282)
Human IL-16 protein GeneSeq Accession W33234 DE19617202, Q14005/IL16_HUMAN Pro-interleukin-16, (isoform 1), (SEQ ID NO: 282)
Thrl 17 human interleukin 9 GeneSeq Accession W27521 WO9708321, P15248|IL9_HUMAN Interleukin-9, (SEQ ID NO: 387)
Metl 17 human interleukin 9 GeneSeq Accession W27522 WO9708321, (SEQ ID NO: 388)
Human intracellular IL- 1 receptor antagonist. GeneSeq Accession W77158 EP864585 (e.g. SEQ ID NOs: 12 to 19, or 22 to 25 of this
publication).
Human interleukin-18 protein (IL-18) GeneSeq Accession W77158 EP864585, Q14116/IL18_HUMAN Interleukin-18, (isoform 1), (SEQ ID
NO: 283)
Human interleukin-18 GeneSeq Accession W77077 EP861663, Q14116/IL18_HUMAN Interleukin-18, (isoform 1), (SEQ ID NO: 283)
Human interleukin 18 derivatives GeneSeq Accessions W77083, W77084, W77085, W77086, W77087, W77088, and W77089 EP861663,
Variants of wildtype IL18 which is provided as:, Q14116/IL18_HUMAN Interleukin-18, (isoform 1), (SEQ ID NO: 283)
Interleukin-9 (IL-9) mature protein (Thr117 version). GeneSeq Accession W68158 WO9827997, FIG. 2 of WO9827997, (SEQ ID NO: 389)
IL-9 mature protein variant (Met117 version) GenSeq Accession W68157 WO9827997, FIG. 3 of WO9827997, (SEQ ID NO: 390)
Human IL-9 receptor protein variant #3. GeneSeq Accession W64058 WO9824904, Wildtype IL-9R is provided as:, Q01113/IL9R_HUMAN
Interleukin-9 receptor, (isoform 1), (SEQ ID NO: 303)
Human IL-9 receptor protein variant fragment GenSeq Accession W64060 WO9824904, Wildtype IL-9R is provided as:,
Q01113/IL9R_HUMAN Interleukin-9 receptor, (isoform 1), (SEQ ID NO: 303)
Human IL-9 receptor protein variant #3. GeneSeq Accession W64061 WO9824904, Wildtype IL-9R is provided as:, Q01113/IL9R_HUMAN
Interleukin-9 receptor, (isoform 1), (SEQ ID NO: 303)
Human Interleukin-12 p40 protein GeneSeq Accession W51311 WO9817689, P2946/|IL12B_HUMAN Interleukin-12 subunit beta, (SEQ ID
NO: 277)
Human Interleukin-12 p35 protein GeneSeq Accession W51312 WO9817689, P29459/IL12A_HUMAN Interleukin-12 subunit alpha, (SEQ
ID NO: 284)
Human protein with IL-16 activity GeneSeq Accession W63753 DE19649233-
Human protein with IL-16 activity GeneSeq Accession W59425 DE19649233-
Human interleukin-15 GeneSeq Accession W53878 U.S. Pat. No. 5,747,024, P40933/IL15_HUMAN Interleukin-15, (isoform IL15-S48AA),
(SEQ ID NO: 285)
Human wild- type interleukin-4 (hIL-4) protein GeneSeq Accession W52149 WO9747744, P05112/IL4_HUMAN Interleukin-4, (isoform 1),
(SEQ ID NO: 286)
interleukin-4 muteins GeneSeq Accessions W52150, W52151, W52153, W52154, W52155, W52156, W52157, W52158, W52159, W52160,
W52161, W52162, W52163, W52164, W52165, W52166, and W52167 WO9747744, Variants of wildtype IL-4 which has the sequence:,
P05112/IL4_HUMAN Interleukin-4, (isoform 1), (SEQ ID NO: 268)
Human interleukin 1 delta GeneSeq Accession Y28408 WO9935268, SEQ ID NO: 4 of WO9935268, (SEQ ID NO: 287)
Human interleukin-1 receptor antagonist beta GeneSeq Accession Y24395 WO9935268,
Human EDIRF II protein sequence GeneSeq Accession Y22199 WO9932632, SEQ ID NO: 6 of WO9932632, (SEQ ID NO: 391)
Human EDIRF I protein sequence GeneSeq Accession Y22197 WO9932632, SEQ ID NO: 2 of WO9932632, (SEQ ID NO: 392)
Human IL- 1RD10 protein sequence GeneSeq Accession Y14131 WO9919480, SEQ ID NO: 20 of WO9919480
Human IL- 1RD9 GeneSeq Accession Y14122 WO9919480, SEQ ID NOS: 6, 8, 10 of WO9919480
Human DNAX interleukin-40 GeneSeq Accession Y09196 WO9919491, SEQ ID NO: 2 or 4 of, WO9919491, (SEQ ID NO: 454)
(DIL-40) alternative sequence GeneSeq Accession Y09197 WO9919491, SEQ ID NO: 4 of, WO9919491, (SEQ ID NO: 455)
IL-11 GeneSeq Accession R50176 WO9405318, P2080/|IL11_HUMAN Interleukin-11, (isoform 1), (SEQ ID NO: 288)
Human adipogenesis inhibitory factor GeneSeq Accession R43260 EP566410, (also known as IL-11), P2080/|IL11_HUMAN Interleukin-11,
(isoform 1), (SEQ ID NO: 288)
IL-11 GeneSeq Accession W02202 JP08127539, P2080/|IL11_HUMAN Interleukin-11, (isoform 1), (SEQ ID NO: 288)
IL-14 GeneSeq Accession R55800 WO9416074, P40222/TXLNA_HUMAN Alpha-taxilin, (SEQ ID NO: 289)
IL-17 receptor GeneSeq Accession B03807 U.S. Pat. No. 6,072,033, Q96F46/|17RA_HUMAN Interleukin-17 receptor A, (SEQ ID NO: 290)
IL-17 GeneSeq Accession R76573 WO9518826, Q16552/IL17_HUMAN Interleukin-17A, (SEQ ID NO: 291)
CTLA-8 GeneSeq Accession W13651 WO9704097, (also known as IL-17), Q16552/IL17_HUMAN Interleukin-17A, (SEQ ID NO: 291)
IL-19 GeneSeq Accession W37935 WO9808870, Q9UHD0|IL19_HUMAN Interleukin-19, (isoform 1), (SEQ ID NO: 292)
IL-21 (TIF) GeneSeq Accession Y92879 WO0024758, Q9HBE4/IL21_HUMAN Interleukin-21, (isoform 1), (SEQ ID NO: 293)
IL-8 receptor GeneSeq Accession R33420 WO9306229, IL-8RA, P25024/CXCR1_HUMAN C-X-C chemokine receptor type 1, (SEQ ID
NO: 294), IL-8RB, P25025/CXCR2_HUMAN C-X-C chemokine receptor type 2, (SEQ ID NO: 295)
Human type II interleukin-1 receptor GeneSeq Accession R85480 U.S. Pat. No. 5,464,937, P27930/IL1R2_HUMAN Interleukin-1 receptor
type 2, (SEQ ID NO: 296)
Human interleukin-12 receptor GeneSeq Accession R69632 EP638644, IL-12 receptor B1, P42701|I12R1_HUMAN Interleukin-12 receptor
subunit beta-1, (isoform 1), (SEQ ID NO: 393), IL-12 receptor B2, Q99665|I12R2_HUMAN Interleukin-12 receptor subunit beta-2, (isoform
1), (SEQ ID NO: 394)
Interleukin 8 receptor B GeneSeq Accession R80758 U.S. Pat. No. 5,440,021, IL-8RB, P25025/CXCR2_HUMAN C-X-C chemokine
receptor type 2, (SEQ ID NO: 295)
Human IL-8 receptor protein hIL8RA GeneSeq Accession B09989 JP08103276, IL-8RA, P25024/CXCR1_HUMAN C-X-C chemokine
receptor type 1, (SEQ ID NO: 294)
Human IL-8 receptor protein hIL8R GeneSeq Accession B09990 JP08103276, IL-8RA, P25024/CXCR1_HUMAN C-X-C chemokine
receptor type 1, (SEQ ID NO: 294); IL-8RB, P25025/CXCR2_HUMAN C-X-C chemokine receptor type 2, (SEQ ID NO: 295)
Interleukin-2 receptor associated protein p43 GeneSeq Accession R97569 WO9621732-, SEQ ID NO: 2 of WO9621732, (SEQ ID NO: 395)
Human interleukin-17 receptor GeneSeq Accession W04185 WO9629408, Q96F46/I17RA_HUMAN Interleukin-17 receptor A, (SEQ ID
NO: 290)
Human interleukin-11 receptor GeneSeq Accession R99090 WO9619574, Q14626/I11RA_HUMAN Interleukin-11 receptor subunit alpha,
(SEQ ID NO: 297)
Human interleukin-1 receptor accessory protein GeneSeq Accession W01911 WO9623067, Human IL1R Acp, SEQ ID NO: 3 of
WO9623067, (SEQ ID NO: 396); Soluble Human IL1R Acp, SEQ ID NO: 9 of WO9623067, (SEQ ID NO: 397)
AGF Protein GeneSeq Accession R92749 U.S. Pat. No. 5,488,032, Q8NI99/ANGL6_HUMAN Angiopoietin-related protein 6, (SEQ ID NO:
278)
Human interleukin-1 type-3 receptor GeneSeq Accession R91064 W09607739, SEQ ID NO: 2 and 4 of WO9607739, (SEQ ID NO:398 and
SEQ ID NO: 399, respectively)
Human interleukin-13 beta receptor GeneSeq Accession W24972 WO9720926, SEQ ID NO: 2 from WO9720926, (SEQ ID NO: 400)
Human interleukin-13 alpha receptor GeneSeq Accession W24973 WO9720926, IL-13RA1, P78552/I13R1_HUMAN Interleukin-13 receptor
subunit alpha-1, (isoform 1), (SEQ ID NO: 298); IL-13RA2, Q14627/I13R2_HUMAN Interleukin-13 receptor subunit alpha-2, (SEQ ID
NO: 299)
Human interleukin-4 receptor GeneSeq Accession W13499 U.S. Pat. No. 5,599,905, P24394/IL4RA_HUMAN Interleukin-4 receptor subunit
alpha, (isoform 1), (SEQ ID NO: 300)
Human interleukin-12 beta-2 receptor GeneSeq Accession W12771 EP759466, Q9966/|I12R2_HUMAN Interleukin-12 receptor subunit beta-
2, (isoform 1), (SEQ ID NO: 301)
Human interleukin-12 beta-1 receptor. GeneSeq Accession W12772 EP759466, P4270/|I12R1_HUMAN Interleukin-12 receptor subunit beta-
1, (isoform 1), (SEQ ID NO: 302)
Human IL-9 receptor protein GeneSeq Accessions W64055, W64056, and W64057 WO9824904, Q01113/IL9R_HUMAN Interleukin-9
receptor, (isoform 1), (SEQ ID NO: 303)
IL-10 receptor GeneSeq Accession W41804 U.S. Pat. No. 5,716,804, IL-10RA, Q13651/I10R1_HUMAN Interleukin-10 receptor subunit
alpha, (SEQ ID NO: 304); IL-10RB, Q0833/|I10R2_HUMAN Interleukin-10 receptor subunit beta, (SEQ ID NO: 305)
Human IL-6 receptor GeneSeq Accession Y30938 JP11196867, P08887/IL6RA_HUMAN Interleukin-6 receptor subunit alpha, (isoform 1),
(SEQ ID NO: 306)
II-17 receptor GeneSeq Accession Y97181 U.S. Pat. No. 6,096,305, Q96F46/I17RA_HUMAN Interleukin-17 receptor A, (SEQ ID NO: 290)
II-17 receptor GeneSeq Accession Y97131 U.S. Pat. No. 6,100,235, Q96F46/I17RA_HUMAN Interleukin-17 receptor A, (SEQ ID NO: 290)
Human interleukin-3 receptor GeneSeq Accession R25300 EP509826, P26951/IL3RA_HUMAN Interleukin-3 receptor subunit alpha,
(isoform 1), (SEQ ID NO: 307)
Human GM- CSF receptor GeneSeq Accession R10919 WO9102063, GM-CSF receptor A, P15509/CSF2R_HUMAN Granulocyte-
macrophage colony-stimulating factor receptor subunit alpha, (isoform 1), (SEQ ID NO: 308); GM-CSF receptor B, P32927/IL3RB_HUMAN
Cytokine receptor common subunit beta, (isoform 1), (SEQ ID NO: 309)
Human IL-5 receptor alpha chain GeneSeq Accession R25064 EP492214, Q01344/IL5RA_HUMAN Interleukin-5 receptor subunit alpha,
(isoform 1), (SEQ ID NO: 310)
II-5 receptor GeneSeq Accession W82842 WO9847923, Q01344/IL5RA_HUMAN Interleukin-5 receptor subunit alpha, (isoform 1), (SEQ
ID NO: 310)
II-6 receptor GeneSeq Accession R37215 JP05091892, P08887/IL6RA_HUMAN Interleukin-6 receptor subunit alpha, (isoform 1), (SEQ ID
NO: 306)
Human B cell stimulating factor-2 receptor GeneSeq Accession P90525 AU8928720, P08887/IL6RA_HUMAN Interleukin-6 receptor
subunit alpha, (isoform 1), (SEQ ID NO: 306)
IL-7 receptor clone GeneSeq Accession R08330 EP403114, P1687/|IL7RA_HUMAN Interleukin-7 receptor subunit alpha, (isoform 1), (SEQ
ID NO: 311)
EPO receptor; EPOR GeneSeq Accession R06512 WO9008822, P19235/EPOR_HUMAN Erythropoietin receptor, (isoform EPOR-F), (SEQ
ID NO: 312)
IL-15 receptor GeneSeq Accession R90843 WO9530695, Q1326/|I15RA_HUMAN Interleukin-15 receptor subunit alpha, (isoform 1), (SEQ
ID NO: 313)
CD137; 4-1BB Receptor Protein GeneSeq Accession R70977 WO9507984, Q07011/TNR9_HUMAN Tumor necrosis factor receptor
superfamily member 9, (SEQ ID NO: 314)
BCMA GeneSeq Accession Y71979 WO0068378, Q02223/TNR17_HUMAN Tumor necrosis factor receptor superfamily member 17,
(isoform 1), (SEQ ID NO: 315)
CD27 GeneSeq Accession R20814 WO9201049, P26842/CD27_HUMAN CD27 antigen, (SEQ ID NO: 316)
CD30 GeneSeq Accession R35478 DE4200043, P28908/TNR8_HUMAN Tumor necrosis factor receptor superfamily member 8, (isoform 1),
(SEQ ID NO: 317)
CD40 GeneSeq Accession Y33499 WO9945944, P25942/TNR5_HUMAN Tumor necrosis factor receptor superfamily member 5, (isoform
1), (SEQ ID NO: 318)
EDAR Genbank Accession AAD50077, Q9UNE0|EDAR_HUMAN Tumor necrosis factor receptor superfamily member EDAR, (isoform 1),
(SEQ ID NO: 319)
OX40; ACT-4 GeneSeq Accession R74737 WO9512673, P43489/TNR4_HUMAN Tumor necrosis factor receptor superfamily member 4,
(SEQ ID NO: 320)
TACI GeneSeq Accession W75783 WO9839361, O14836/TR13B_HUMAN Tumor necrosis factor receptor superfamily member 13B,
(isoform 1), (SEQ ID NO: 321)
TNF-R GeneSeq Accession R10986 AU9058976, P19438/TNR1A_HUMAN Tumor necrosis factor receptor superfamily member 1A,
(isoform 1), (SEQ ID NO: 322)
TNF-RII; TNF p75 receptor; Death Receptor GeneSeq Accession R11141 EP418014, P20333/TNR1B_HUMAN Tumor necrosis factor
receptor superfamily member 1B, (isoform 1), (SEQ ID NO: 323)
hAPO-4; TROY GeneSeq Accession W93581 WO9911791, Q9NS68/TNR19_HUMAN Tumor necrosis factor receptor superfamily
member 19, (isoform 1), (SEQ ID NO: 324)
TNF-alpha precursor GeneSeq Accession P60074 EP205038
Human TNF- alpha GeneSeq Accession R62463 EP619372, P01375/TNFA_HUMAN Tumor necrosis factor, (SEQ ID NO: 325)
Human TNF- alpha GeneSeq Accession R42679 EP563714, P01375/TNFA_HUMAN Tumor necrosis factor, (SEQ ID NO: 325)
Human TNF- beta (LT-alpha) GeneSeq Accession B37799 WO0064479, P01374/TNFB_HUMAN Lymphotoxin-alpha, (SEQ ID NO: 326)
LT-alpha GeneSeq Accession P70107 EP250000, P01374/TNFB_HUMAN Lymphotoxin-alpha, (SEQ ID NO: 326)
LT-beta GeneSeq Accession R56869 WO9413808, Q06643/TNFC_HUMAN Lymphotoxin-beta, (isoform 1), (SEQ ID NO: 327)
OPGL GeneSeq Accession W83195 W09846751, O14788/TNF11_HUMAN Tumor necrosis factor ligand superfamily member 11, (isoform
1), (SEQ ID NO: 328)
FasL GeneSeq Accession W98071 WO9903999, P48023/TNFL6_HUMAN Tumor necrosis factor ligand superfamily member 6, (isoform 1),
(SEQ ID NO: 329)
FasL GeneSeq Accession W95041 WO9903998, P48023/TNFL6_HUMAN Tumor necrosis factor ligand superfamily member 6, (isoform 1),
(SEQ ID NO: 329)
CD27L GeneSeq Accession R50121 WO9405691, P32970/CD70_HUMAN CD70 antigen, (isoform 1), (SEQ ID NO: 330)
CD30 ligand GeneSeq Accession R45007 WO9324135, P32971/TNFL8_HUMAN Tumor necrosis factor ligand superfamily member 8,
(SEQ ID NO: 331)
CD40L GeneSeq Accession R85486 WO9529935, P29965/CD40L_HUMAN CD40 ligand, (SEQ ID NO: 332)
4-1BB ligand GeneSeq Accession W26657 U.S. Pat. No. 5,674,704, P41273/TNFL9_HUMAN Tumor necrosis factor ligand superfamily
member 9, (SEQ ID NO: 333)
FAS Ligand Inhibitory Protein (DcR3) GeneSeq Accession B19335 WO0058465, O95407/TNF6B_HUMAN Tumor necrosis factor receptor
superfamily member 6B, (SEQ ID NO: 334)
OX40L GeneSeq Accession R79903 WO9521915, P23510/TNFL4_HUMAN Tumor necrosis factor ligand superfamily member 4, (isoform
1), (SEQ ID NO: 335)
Protease inhibitor peptides GeneSeq Accessions R12435, R12436, R12437, R12438, R12439, R12440, and R1244 WO9106561
Retroviral protease inhibitors GeneSeq Accessions R06660, R06661, R06662, R06663, R06664, R06665, R06666, R06667, R06668,
R06669, R06670, R06671, R06672, R06673, R06674, R06675, and R06676 EP387231
HIV protease inhibiting peptides GeneSeq Accessions R59293, R59294, R59295, R59296, R59297, R59298, R59299, R592300, R59301,
R59302, R59301, R59302, R59303, R59304, R59305, R59306, R59307, R59308, R59309, R59310, R59311, R59312, R59313, R59314,
R59315, R59316, R59317 R59318, R59319, R59320, R59321, R59322, R59323, R59324, R59325, R59326, R59327, R59328, R59329,
R59330, R59331, R59332, R59333, R59334, R59335, R59336, R59337, R59338, R59339, R59340, R59341, R59342, R59343, R59344,
R59345, R59346, R59347, R59348, R59349, and R59350 WO9301828
HIV-1 protease inhibitors GeneSeq Accessions R86326, R86327, R86328, R86329, R86330, R86331, R86332, R86333, R86334, R86335,
R86336, R86337, R86338, R86339, R86340, R86341, R86342, R86343, R86344, R86345, R86346, R86347, R86348, R86349, R86350,
R86351, R86352, R86353, R86354, R86355, R86356, R86357, R86358, R86359, R86360, R86361, R86362, R86363, R86364, R86365,
R86366, R86367, R86368, R86369, R86370, and R86371 DE4412174
HIV Inhibitor Peptide GeneSeq Accession Y89687 WO9959615
HIV Inhibitor Peptide GenSeq Accession Y31955 WO9948513
HIV Inhibitor Peptide Science 291, 884 (2001); Published online 12 Jan. 2001; 10.1126/science.1 057453
Human monocyte chemoattractant factor hMCP-3 GeneSeq Accession R73915 WO9509232, P80098/CCL7_HUMAN C-C motif chemokine
7, (SEQ ID NO: 336)
Human monocyte chemoattractant factor hMCP-1 GeneSeq Accession R73914 WO9509232, P13500/CCL2_HUMAN C-C motif chemokine
2, (SEQ ID NO: 337)
Human gro-beta chemokine GeneSeq Accessions R66699 and W17671 WO9429341, P19875/CXCL2_HUMAN C-X-C motif chemokine 2,
(SEQ ID NO: 338)
Human gro-gamma chemokine GeneSeq Accessions R66700 and W17672 WO9429341, P19876/CXCL3_HUMAN C-X-C motif chemokine
3, (SEQ ID NO: 339)
Human gro-alpha chemokine GeneSeq Accessions R66698 and W18024 WO9429341, P09341/GROA_HUMAN Growth-regulated alpha
protein, (SEQ ID NO: 340)
Human eosinophil- expressed chemokine (EEC) GeneSeq Accession W05186 WO9632481, SEQ ID NO: 2 of WO9632481, (SEQ ID NO:
401)
Chemokine-like protein PF4-414 Full-Length and Mature GeneSeq Accessions R92318 and R99809 WO9613587, FIG. 3C of WO9613587,
(SEQ ID NO: 402)
Chemokine-like protein IL-8M3 GeneSeq Accession R99812 WO9613587
Human interleukin-8 (IL-8) GeneSeq Accession R99814 WO9613587, P10145/IL8_HUMAN Interleukin-8, (isoform 1), (SEQ ID NO: 341)
Chemokine-like protein IL-8M1 Full-Length and Mature GeneSeq Accessions R99815 and R99803 WO9613587, FIG. 4B of WO9613587,
(SEQ ID NO: 403)
Chemokine-like protein IL-8M8 Full-Length and Mature GeneSeq Accessions R99816 and R99805 WO9613587, FIG. 4C of WO9613587,
(SEQ ID NO: 404)
Chemokine-like protein IL-8M8 Full-Length and Mature GeneSeq Accessions R99817 and R99806 WO9613587, FIG. 4C of WO9613587,
(SEQ ID NO: 404)
Chemokine-like protein IL-8M8 Full-Length and Mature GeneSeq Accessions R99818 and R99804 WO9613587, FIG. 4C of WO9613587,
(SEQ ID NO: 404)
Chemokine-like protein IL-8M8 Full-Length and Mature GeneSeq Accessions R99819 and R99807 WO9613587, FIG. 4C of WO9613587,
(SEQ ID NO: 404)
Chemokine-like protein IL-8M8 Full-Length and Mature GeneSeq Accessions R99822 and R9807 WO9613587, FIG. 4C of WO9613587,
(SEQ ID NO: 404)
Human foetal spleen ex- pressed chemo-kine, FSEC GeneSeq Accession R98499 WO9622374, SEQ ID NO: 2 of, WO9622374,
(SEQ ID NO: 405)
Liver expressed chemokine- 1(LVEC-1) GeneSeq Accession R95689 WO9616979, SEQ ID NO: 2 of, WO9616979, (SEQ ID NO: 406)
Liver expressed chemokine- 2(LVEC-2) GeneSeq Accession R95690 WO9616979, SEQ ID NO: 4 of, WO9616979, (SEQ ID NO: 407)
Pituitary expressed chemokine (PGEC) GeneSeq Accession R95691 WO9616979, SEQ ID NO: 6 of, WO9616979, (SEQ ID NO: 408)
Adenoid- expressed chemokine (ADEC) GeneSeq Accession R97664 WO9617868, SEQ ID NO: 2 of, WO9617868, (SEQ ID NO: 409)
Human chemokine CC-2 GeneSeq Accession W38170 WO9741230, Q16663/CCL15_HUMAN C-C motif chemokine 15, (SEQ ID NO: 342)
Human chemokine HCC-1 GeneSeq Accession W38171 WO9741230, Q16627/CCL14_HUMAN C-C motif chemokine 14, (SEQ ID NO:
343)
Human chemokine CC- 3 GeneSeq Accession W38172 WO9741230, Q16627/CCL14_HUMAN C-C motif chemokine 14, (SEQ ID NO:
343)
Novel betachemokine designated PTEC GeneSeq Accession W27271 WO9739126, SEQ ID NO: 2 of WO9739126, (SEQ ID NO: 410)
Human CX3C 111 amino acid chemokine GeneSeq Accession W23344 WO9727299, SEQ ID NO: 2 of WO9727299, (SEQ ID NO: 411)
Human CCF18 chemokine GeneSeq Accession W25942 WO9721812, SEQ ID NO: 4 of WO9721812, (SEQ ID NO: 412)
Human beta- chemokine H1305 (MCP-2) GeneSeq Accession W26655 WO9725427, P80075/CCL8_HUMAN C-C motif chemokine 8,
(SEQ ID NO: 344)
Human eosinocyte CC type chemokine eotaxin GeneSeq Accession W14990 WO9712914, P51671/CCL11_HUMAN Eotaxin, (SEQ ID NO:
245)
Human thymus and activation regulated cytokine (TARC) GeneSeq Accession W14018 WO9711969, Q92583/CCL17_HUMAN C-C motif
chemokine 17, (SEQ ID NO: 261)
Human chemokine beta-8 short forms GeneSeq Accession W16315 WO9712041, Wildtype chemokine beta-8 provided as:,
P55773|CCL23_HUMAN C-C motif chemokine 23, (SEQ ID NO: 459)
Microphage derived chemokine, MDC GeneSeq Accession W20058 WO9640923, O00626/CCL22_HUMAN C-C motif chemokine 22,
(SEQ ID NO: 345)
Human chemokine ZSIG-35 GeneSeq Accession W30565 WO9844117, SEQ ID NO: 2 of WO WO9844117, (SEQ ID NO: 413)
Primate CC chemokine “ILINCK” GeneSeq Accesssion W69990 WO98328658, SEQ ID NO: 4 from WO9832858, (SEQ ID NO: 414)
Primate CXC chemokine “IBICK” GeneSeq Accession W69989 WO9832858, SEQ ID NO: 2 from WO9832858, (SEQ ID NO: 415)
Human CC-type chemokine protein designated SLC (secondary lymphoid chemokine) GeneSeq Accession W69163 WO9831809,
O00585/CCL21_HUMAN C-C motif chemokine 21, (SEQ ID NO: 346)
Human CC chemokine ELC protein GeneSeq Accession W62542 WO9826071, Q99731/CCL19_HUMAN C-C motif chemokine 19,
(SEQ ID NO: 249)
Human DVic-1 C-C chemokine GeneSeq Accession W60649 WO9823750, SEQ ID NO: 2 of WO9823750, (SEQ ID NO: 416)
Human C-C chemokine DGWCC GeneSeq Accession W60650 WO9823750, SEQ ID NO: 6 of WO9823750, (SEQ ID NO: 417)
Human STCP-1 GeneSeq Accession W62783 WO9824907, O00626/CCL22_HUMAN C-C motif chemokine 22, (SEQ ID NO: 345)
Exodus protein GeneSeq Accession W61279 WO9821330, P78556/CCL20_HUMAN C-C motif chemokine 20, (isoform 1), (SEQ ID
NO: 248)
Human Chr19kine protein GeneSeq Acession W50887 WO9814581, SEQ ID NO: 10 of WO9814581, (SEQ ID NO: 418)
Human T cell mixed lymphocyte reaction expressed chemokine (TMEC) GeneSeq Accession W58703 U.S. Pat. No. 5,780,268, SEQ ID
NO: 2 of U.S. Pat. No. 5,780,268, (SEQ ID NO: 460)
Human 6CKine protein GeneSeq Accession W50885 W09814581, SEQ ID NO: 8 of WO9814581, (SEQ ID NO: 419)
human liver and activation regulated chemokine (LARC) GeneSeq Accession W57475 WO9817800, P78556/CCL20_HUMAN C-C motif
chemokine 20, (isoform 1), (SEQ ID NO: 248)
RANTES peptide GeneSeq Accession W29538 WO9744462, Wildtype Rantes provided herien as P13501/CCL5_HUMAN C-C motif
chemokine 5, (SEQ ID NO: 241)
RANTES 8-68 GeneSeq Accession W29529 WO9744462, Wildtype Rantes provided herien as P13501/CCL5_HUMAN C-C motif
chemokine 5, (SEQ ID NO: 241)
RANTES 9-68 GeneSeq Accession W29528 WO9744462, Wildtype Rantes provided herien as P13501/CCL5_HUMAN C-C motif
chemokine 5, (SEQ ID NO: 241)
Human chemokine protein 331D5 GeneSeq Accession W59433 WO9811226, SEQ ID NO: 12 of WO9811226, (SEQ ID NO: 420)
Human chemokine protein 61164 GeneSeq Accession W59430 WO9811226, SEQ ID NO: 6 of WO9811226, (SEQ ID NO: 421)
Chemokine MCP-4 GeneSeq Accession W56690 WO9809171, Q99616/CCL13_HUMAN C-C motif chemokine 13, (SEQ ID NO: 347)
Human stromal cell-derived chemokine, SDF-1 GeneSeq Accession W50766 FR2751658, P48061/SDF1_HUMAN Stromal cell-derived
factor 1, (isoform beta), (SEQ ID factor 1, (isoform beta), (SEQ ID NO: 260)
Thymus expressed chemokine (TECK) GeneSeq Accession W44397 WO9801557, O15444/CCL25_HUMAN C-C motif chemokine 25,
(SEQ ID NO: 348)
Human chemokine MIP-3alpha GeneSeq Accession W44398 WO9801557, P78556/CCL20_HUMAN C-C motif chemokine 20, (isoform
1), (SEQ ID NO: 248)
Human chemokine MIP-3beta GeneSeq Accession W44399 WO9801557, Q99731/CCL19_HUMAN C-C motif chemokine 19, (SEQ ID
NO: 249)
Human monocyte chemotactic proprotein (MCPP) sequence GeneSeq Accession W42072 WO9802459, SEQ ID NO: 1 of WO9802459,
(SEQ ID NO: 456)
Macrophage- derived chemokine (MDC) GeneSeq Accessions W40811 and Y24414 U.S. Pat. No. 5,688,927/U.S. Pat. No. 5,932,703,
O00626/CCL22_HUMAN C-C motif chemokine 22, (SEQ ID NO: 345)
Macrophage derived chemokine analogue MDC-eyfy GeneSeq Accession Y24416 U.S. Pat. No. 5,932,703 (“eyfy” disclosed as SEQ
ID NO: 546), Wildtype MDC is SEQ ID NO: 2 of 5,932,703, (SEQ ID NO: 422)
Macrophage derived chemokine analogue MDC (n + 1) GeneSeq Accession Y24413 U.S. Pat. No. 5,932,703
Macrophage derived chemokine analogue MDC-yl GeneSeq Accession Y24415 U.S. Pat. No. 5,932,703
Human type CC chemokine eotaxin 3 protein sequence GeneSeq Accession Y43178 JP11243960, Q9Y258/CCL26_HUMAN C-C motif
chemokine 26, (SEQ ID NO: 349)
Human MCP-3 and human Muc-1 core epitope (VNT) fusion protein GeneSeq Acession Y29893 W09946392, Wildtype MCP-3 has the
sequence:, P80098/CCL7_HUMAN C-C motif chemokine 7, (SEQ ID NO: 336); Wildtype Muc-1 has the sequence:,
P15941|MUC1_HUMAN Mucin-1, (isoform 1), (SEQ ID NO: 461)
Human IP-10 and human Muc-1 core epitope (VNT) fusion protein GeneSeq Accession Y29894 WO9946392, Wildtype IP10 has the sequence:,
P02778/CXL10_HUMAN C-X- C motif chemokine 10, (SEQ ID NO: 242); Wildtype Muc-1 has the sequence:, P15941|MUC1_HUMAN
Mucin-1, (isoform 1), (SEQ ID NO: 461)
Human IP-10 and HIV-1 gp 120 hyper- variable region fusion protein GeneSeq Accession Y29897 W09946392, Wildtype IP10 has the
sequence:, P02778/CXL10_HUMAN C-X-C motif chemokine 10, (SEQ ID NO: 242); Wildtype gp120 has the sequence:, P03378|32-509,
(cleaved product of gp160), (SEQ ID NO: 462)
Human mammary associated chemokine (MACK) protein Full-Length and Mature GeneSeq Accessions Y29092 and Y29093 WO9936540,
Full-length: SEQ ID NO: 1 of WO9936540, (SEQ ID NO: 423); Mature Form: SEQ ID NO: 2 of WO9936540, (SEQ ID NO: 424)
Tim-1 protein GeneSeq Accession Y28290 WO9933990, SEQ ID NO: 2 of, WO9933990, (SEQ ID NO: 350)
Human Lkn-1 Full-Length and Mature protein GeneSeq Accessions Y17280, Y17274, Y17281, and Y17275 WO9928473 and WO9928472,
Q16663/CCL15_HUMAN C-C motif chemokine 15, (SEQ ID NO: 342)
N-terminal modified chemokine met- hSDF-1 alpha GeneSeq Accession Y05818 WO9920759, SEQ ID NO: 10 of WO9920759, (SEQ ID
NO: 425)
N-terminal modified chemokine met- hSDF-1 beta GeneSeq Accession Y05819 WO9920759, SEQ ID NO: 11 of WO9920759, (SEQ ID
NO: 426)
N-terminal modified chemokine GroHEK/hSDF- 1alpha GeneSeq Accession Y05820 WO9920759, SEQ ID NO: 12 of WO9920759, (SEQ
ID NO: 427)
N-terminal modified chemokine GroHEK/hSDF- 1beta. GeneSeq Accession Y05821 WO9920759, SEQ ID NO: 13 of WO9920759, (SEQ
ID NO: 428)
Chemokine Eotaxin GeneSeq Accession Y14230 WO9912968, P51671/CCL11_HUMAN Eotaxin, (SEQ ID NO: 245)
Chemokine hMCP1a GeneSeq Accession Y14225 WO9912968
Chemokine hMCP1b GeneSeq Accession Y14226 WO9912968
Chemokine hSDF1b GeneSeq Accession Y14228 WO9912968, P48061/SDF1_HUMAN Stromal cell-derived factor 1, (isoform beta),
(SEQ ID NO: 260)
Chemokine hIL-8 GeneSeq Accession Y14229 WO9912968, P10145/IL8_HUMAN Interleukin-8, (isoform 1), (SEQ ID NO: 341)
Chemokine hMCP1 GeneSeq Accession Y14222 WO9912968, P13500/CCL2_HUMAN C-C motif chemokine 2, (SEQ ID NO: 337)
Chemokine hMCP2 GeneSeq Accession Y14223 WO9912968, P80075/CCL8_HUMAN C-C motif chemokine 8, (SEQ ID NO: 344)
Chemokine hMCP3 GeneSeq Accession Y14224 WO9912968, P80098/CCL7_HUMAN C-C motif chemokine 7, (SEQ ID NO: 336)
C-C chemokine, MCP2 GeneSeq Accession Y05300 EP905240, P80075/CCL8_HUMAN C-C motif chemokine 8, (SEQ ID NO: 344)
Wild type monocyte chemotactic protein 2 GeneSeq Accession Y07233 EP906954, P80075/CCL8_HUMAN C-C motif chemokine 8,
(SEQ ID NO: 344)
Truncated monocyte chemotactic protein 2 (6-76) GeneSeq Accession Y07234 EP906954, FIG. 1 of EP905241 and EP906954, (SEQ
ID NO: 429)
Truncated RANTES protein (3-68) GeneSeq Accessions Y07236 and Y07232 EP905241; EP906954, FIG. 1 of EP906954, (SEQ ID
NO: 430)
Wild type monocyte chemotactic protein 2 GeneSeq Accession Y07237 EP905241, P80075/CCL8_HUMAN C-C motif chemokine 8,
(SEQ ID NO: 344)
Truncated monocyte chemotactic protein 2 (6-76) GeneSeq Accession Y07238 EP905241, FIG. 1 of EP905241 and EP906954, (SEQ
ID NO: 429)
A partial CXCR4B protein GeneSeq Accession W97363 EP897980, SEQ ID NO: 2 of EP897980, (SEQ ID NO: 431)
Interferon gamma- inducible protein (IP-10) GeneSeq Accession W96709 U.S. Pat. No. 5,871,723, P02778/CXL10_HUMAN C-X-C
motif chemokine 10, (SEQ ID NO: 242)
A monokine induced by gamma- interferon (MIG) GeneSeq Accession W96710 U.S. Pat. No. 5,871,723, Q07325/CXCL9_HUMAN
C-X-C motif chemokine 9, (SEQ ID NO: 351)
Interleukin-8 (IL-8) protein. GeneSeq Accession W96711 U.S. Pat. No. 5,871,723, P10145/IL8_HUMAN Interleukin-8, (isoform 1),
(SEQ ID NO: 341)
Epithelial neutrophil activating protein-78 (ENA-78) GeneSeq Accession W96712 U.S. Pat. No. 5,871,723, P42830/CXCL5_HUMAN
C-X-C motif chemokine 5, (SEQ ID NO: 352)
Growth related oncogene-alpha (GRO-alpha). GeneSeq Accession W96713 U.S. Pat. No. 5,871,723, P09341/GROA_HUMAN Growth-
regulated alpha protein, (SEQ ID NO: 340)
Growth related oncogene-beta (GRO-beta). GeneSeq Accession W96714 U.S. Pat. No. 5,871,723, P19875/CXCL2_HUMAN C-X-C
motif chemokine 2, (SEQ ID NO: 338)
Growth related oncogene- gamma (GRO-gamma) GeneSeq Accession W96715 U.S. Pat. No. 5,871,723, P19876/CXCL3_HUMAN
C-X-C motif chemokine 3, (SEQ ID NO: 339)
A platelet basic protein (PBP) GeneSeq Accession W96716 U.S. Pat. No. 5,871,723, P02775/CXCL7_HUMAN Platelet basic protein,
(SEQ ID NO: 353)
Connective tissue activating protein-III (CTAP-III) GeneSeqAc- cession S96717 U.S. Pat. No. 5,871,723, SEQ ID NO: 9 of U.S. Pat.
No. 5,871,723, (SEQ ID NO: 354)
Beta-thrombo- globulin protein (beta-TG) GeneSeq Accession W96718 U.S. Pat. No. 5,871,723, SEQ ID NO: 10 of U.S. Pat. No.
5,871,723, (SEQ ID NO: 355)
Neutrophil activating peptide-2 (NAP-2) GeneSeq Accession W96719 U.S. Pat. No. 5,871,723, SEQ ID NO: 11 of U.S. Pat. No.
5,871,723, (SEQ ID NO: 356)
Granulocyte chemotactic protein-2 (GCP-2) GeneSeq Accession W96720 U.S. Pat. No. 5,871,723, P80162/CXCL6_HUMAN C-X-C
motif chemokine 6, (SEQ ID NO: 357)
Human chemokine MIG-beta protein GeneSeq Accession W90124 EP887409, (SEQ ID NO: 463)
Human ZCHEMO-8 GeneSeq Accession W82716 WO9854326, SEQ ID NO: 2 of WO9854326, (SEQ ID NO: 432)
Human Act-2 protein GeneSeq Accession W82717 WO9854326, P13236/CCL4_HUMAN C-C motif chemokine 4, (SEQ ID NO: 358)
Human SISD protein GeneSeq Acession W82720 WO9854326, P13501/CCL5_HUMAN C-C motif chemokine 5, (SEQ ID NO: 241)
Human MI10 protein GeneSeq Accession W82721 WO9854326, SEQ ID NO: 37 of WO9854326, (SEQ ID NO: 433)
Human MI1A protein GeneSeq Accession W82722 WO9854326, SEQ ID NO: 38 of WO9854326, (SEQ ID NO: 434)
Human CCC3 protein GeneSeq Accession W82723 WO9854326, SEQ ID NO: 39 of WO9854326, (SEQ ID NO: 435)
A human L105 chemokine designated huL105_3. GeneSeq Accession W87588 WO9856818, SEQ ID NO: 2 of WO9856818, (SEQ ID
NO: 436)
A human L105 chemokine designated huL105_7. GeneSeq Accession W87589 WO9856818, SEQ ID NO: 4 of WO9856818, (SEQ ID
NO: 437)
Human mature gro-alpha polypeptide used to treat sepsis GeneSeq Accession W81498 WO9848828, P09341/GROA_HUMAN Growth-
regulated alpha protein, (SEQ ID NO: 340)
Human mature gro-gamma polypeptide used to treat sepsis GeneSeq Accession W81500 WO9848828, P19876/CXCL3_HUMAN C-X-C
motif chemokine 3, (SEQ ID NO: 339)
Human thymus expressed chemokine TECK and TECK variant GeneSeq Accessions B19607 and B19608 WO0053635, Wildtype
TECKprovided as:, O15444/CCL25_HUMAN C-C motif chemokine 25, (SEQ ID NO: 348)
Human chemokine SDF1alpha GeneSeq Accession B15791 WO0042071, P48061-2/SDF1_HUMAN Isoform Alpha of Stromal cell-
derived factor 1, (isoform alpha), (SEQ ID NO: 259),
Human chemokine GRO-alpha GeneSeq Accession B15793 WO0042071, P09341/GROA_HUMAN Growth-regulated alpha protein,
(SEQ ID NO: 340)
Human chemokine eotaxin GeneSeq Accession B15794 WO0042071, P51671/CCL11_HUMAN Eotaxin, (SEQ ID NO: 245)
Human chemokine MIG GeneSeq Accession B15803 WO0042071, Q07325/CXCL9_HUMAN C-X-C motif chemokine 9, (SEQ ID
NO: 351)
Human chemokine PF4 GeneSeq Accession B15804 WO0042071, P02776/PLF4_HUMAN Platelet factor 4, (SEQ ID NO: 359)
Human chemokine I- 309 GeneSeq Accession B15805 WO0042071, P22362/CCL1_HUMAN C-C motif chemokine 1, (SEQ ID NO:
360)
Human chemokine HCC-1 GeneSeq Accession B15806 WO0042071, Q16627/CCL14_HUMAN C-C motif chemokine 14, (SEQ
ID NO: 361)
Human chemokine C10 GeneSeq Accession B15807 WO0042071, SEQ ID NO: 49 of WO0042071, (SEQ ID NO: 438)
Human chemokine CCR-2 GeneSeq Accession B15808 WO0042071, P41597/CCR2_HUMAN C-C chemokine receptor type 2,
(isoform A), (SEQ ID NO: 362)
Human chemokine ENA-78 GeneSeq Accession B15809 WO0042071, P42830/CXCL5_HUMAN C-X-C motif chemokine 5,
(SEQ ID NO: 352)
Human chemokine GRObeta GeneSeq Accession B15810 WO0042071, P19875/CXCL2_HUMAN C-X-C motif chemokine 2,
(SEQ ID NO: 338)
Human chemokine IP-10 GeneSeq Accession B15811 WO0042071, P02778/CXL10_HUMAN C-X-C motif chemokine 10, (SEQ
ID NO: 242)
Human chemokine SDF1beta GeneSeq Accession B15812 WO0042071, P48061/SDF1_HUMAN Stromal cell-derived factor 1,
(isoform beta), (SEQ ID NO: 260)
Human chemokine GRO alpha GeneSeq Accession B15813 WO0042071, P09341/GROA_HUMAN Growth-regulated alpha protein,
(SEQ ID NO: 340),
Human chemokine MIP1beta GeneSeq Accession B15831 WO0042071, P13236/CCL4_HUMAN C-C motif chemokine 4, (SEQ ID
NO: 358)
A human C-C chemokine designated exodus GeneSeq Accession B07939 U.S. Pat. No. 6,096,300, P78556/CCL20_HUMAN C-C motif
chemokine 20, (isoform 1), (SEQ ID NO: 248)
Human chemokine L105_7 GeneSeq Accession Y96922 U.S. Pat. No. 6,084,071, SEQ ID NO: 4 of WO9856818, (SEQ ID NO: 437)
Human chemokine L105_3 GeneSeq Accession Y96923 U.S. Pat. No. 6,084,071, SEQ ID NO: 2 of WO9856818, (SEQ ID NO: 436)
Human secondary lymphoid chemokine (SLC) GeneSeq Accession B01434 WO0038706, O00585/CCL21_HUMAN C-C motif
chemokine 21, (SEQ ID NO: 346)
Human non- ELR CXC chemokine H174 GeneSeq Accession Y96310 WO0029439, O14625/CXL11_HUMAN C-X-C motif chemokine 11,
(SEQ ID NO: 363)
Human non- ELR CXC chemokine IP10 GeneSeq Accession Y96311 WO0029439, P02778/CXL10_HUMAN C-X-C motif chemokine 10,
(SEQ ID NO: 242)
Human non- ELR CXC chemokine Mig GeneSeq Accession Y96313 WO0029439, Q07325/CXCL9_HUMAN C-X-C motif chemokine 9,
(SEQ ID NO: 351)
Human chemokine Ckbeta-7 GeneSeq Accession Y96280 WO0028035, FIG.1 of WO0028035, (SEQ ID NO: 439)
Human chemokine MIP-1alpha GeneSeq Accession Y96281 WO0028035, P10147/CCL3_HUMAN C-C motif chemokine 3, (SEQ ID NO:
364)
Human mature chemokine Ckbeta-7 (optionally truncated) GenSeq Accession Y96282 WO0028035, FIG. 1 of WO0028035, (SEQ ID NO:
440)
Human chemokine receptor CXCR3 GeneSeq Accession Y79372 WO0018431, P49682|CXCR3_HUMAN C-X-C chemokine receptor type
3, (isoform 1), (SEQ ID NO: 240)
Human neurotactin chemokine like domain GeneSeq Accession Y53259 U.S. Pat. No. 6,043,086, P78423/X3CL1_HUMAN Fractalkine,
(SEQ ID NO: 244)
Human CC type chemokine interleukin C GeneSeq Accession Y57771 JP11302298
Human CKbeta- 9 GeneSeq Accession B50860 U.S. Pat. No. 6,153,441, O00585/CCL21_HUMAN C-C motif chemokine 21, (SEQ ID NO:
346)
Preproapolipo- protein “paris” variant GeneSeq Accession W08602 WO9637608, (SEQ ID NO: 466)
Preproapolipo- protein “milano” variant 5,721,114, SEQ ID NO: 6 of U.S. Pat. No. 5,721,114, (SEQ ID NO: 441)
Glycodelin-A; Progesterone- associated endometrial protein GeneSeq Accession W00289 WO9628169, P09466/PAEP_HUMAN Glycodelin,
(SEQ ID NO: 365)
NOGO-A Genbank Accession CAB99248, (SEQ ID NO: 366)
NOGO-B Genbank Accession CAB99249, (SEQ ID NO: 367)
NOGO-C Genbank Accession CAB99250, (SEQ ID NO: 368),
NOGO-66 Receptor Genbank Accession AAG53612, (SEQ ID NO: 369)
Antibodies specific for collapsin U.S Pat. No. 5,416,197, Wildtype collapsin has the sequence:, SEQ ID NO: 2 of 5,416,197, (SEQ ID NO:
464)
Humanized Anti-VEGF Antibodies, and fragments thereof WO9845331
Humanized Anti-VEGF Antibodies, and fragments thereof WO0029584
Membrane bound proteins GeneSeq. Accession Y66631-Y66765 WO9963088
Secreted and Transmembrane polypeptides GeneSeq Accession B44241-B44334 WO0053756
Secreted and Transmembrane polypeptides GeneSeq Accession Y41685-Y41774 WO9946281
Interleukin 2 (IL-2), (SEQ ID NO: 548)
Interleukin 15_vA, (IL-15_vA), (SEQ ID NO: 549)
Interleukin 15_vB, (IL-15_vB), (SEQ ID NO: 550)
Interleukin 15_vC, (IL-15_vC), (SEQ ID NO: 551)
Interleukin 15_vD, (IL15_vD), (SEQ ID NO: 552)
Interleukin 15_vE, (IL15_vE), (SEQ ID NO: 553)
Interleukin 15_vF, (IL15_vF), (SEQ ID NO: 565)
Interleukin 22, (IL22), (SEQ ID NO: 554)
Fibroblast Growth Factor 1 (FGF1), (SEQ ID NO: 555)
Fibroblast Growth Factor 1_vA, (FGF1_vA), (SEQ ID NO: 556)
Fibroblast Growth Factor 1_vB, (FGF1_vB), (SEQ ID NO: 557)
Fibroblast Growth Factor 1_vC, (FGF1_vC), (SEQ ID NO: 566)
Fibroblast Growth Factor 19_vA, (FGF19_vA), (SEQ ID NO: 558)
Fibroblast Growth Factor 21, (FGF21), (SEQ ID NO: 559)
Fibroblast Growth Factor 23, (FGF23), (SEQ ID NO: 560)
Brain-Derived Neurotrophic Factor (BDNF), (SEQ ID NO: 561)
Serpin Family A Member 1, (SERPINA1), ((SEQ ID NO: 584) and ((SEQ ID NO: 585)
Serpin Peptidase Inhibitor, Clade B (Ovalbumin), Member 1, (SERPINB1), (SEQ ID NO: 562)
CASPASE1, (SEQ ID NO: 563)
Leukemia Inhibitory Factor, (LIF), (SEQ ID NO: 564)
Proprotein Convertase Subtilisin/Kexin Type 1, (PCSK1), (SEQ ID NO: 567)
Proprotein Convertase Subtilisin/Kexin Type 2 (PCSK2), (SEQ ID NO: 568)
Proprotein Convertase Subtilisin/Kexin Type 3, (PCSK3), (SEQ ID NO: 569)
Proprotein Convertase Subtilisin/Kexin Type 3 Sol, (PCSK3_SOL), (SEQ ID NO: 570)
Proprotein Convertase Subtilisin/Kexin Type 4, (PCSK4), (SEQ ID NO: 571)
Proprotein Convertase Subtilisin/Kexin Type 5, (PCSK5), (SEQ ID NO: 572)
Proprotein Convertase Subtilisin/Kexin Type 6 (PCSK6), (SEQ ID NO: 573)
Proprotein Convertase Subtilisin/Kexin Type, (PCSK7), (SEQ ID NO: 574)
Proprotein Convertase Subtilisin/Kexin Type 8, (PCSK8), (SEQ ID NO: 575)
Proprotein Convertase Subtilisin/Kexin Type 9, (PCSK9), (SEQ ID NO: 576)
Membrane-Bound Transcription Factor Peptidase, Site 2, (MBTPS2), (SEQ ID NO: 577)
Carboxypeptidase E, (CPE), (SEQ ID NO: 578)

[0393] In various embodiments, the present methods and compositions find use in treating or preventing one or more of diseases or disorders in the table below. In various embodiments, the present methods and compositions find use in treating or preventing one or more of diseases or disorders in the table below for instance by modulating the genes associated with the diseases in the table below. In embodiments, the present methods and compositions find use in gene-editing the genes described in the below Table 2C using the present compositions.

TABLE 2C

| Category | Disease | Genes | Entrez ID |
|---|---|---|---|
| Disorders of | Galactosemia | GALT, GALK1, GALE | 2592, 2584, 2582 |
| carbohydrate | Essential fructosuria | KHK | 3795 |
| metabolism | Hereditary fructose intolerance | ALDOB | 229 |
| | Glycogen storage disease type I | G6PC, SLC37A4, | 2538, 2542, 10786 |
| | | SLC17A3 | |
| | Glycogen storage disease type II | GAA | 2548 |
| | Glycogen storage disease type III | AGL | 178 |
| | Glycogen storage disease type IV | GBE1 | 2632 |
| | Glycogen storage disease type V | PYGM | 5837 |
| | Glycogen storage disease type VI | PYGL | 5836 |
| | Glycogen storage disease type VII | PYGM | 5837 |
| | Glycogen storage disease type IX | PHKA1, PHKA2, PHKB, | 5255, 5256, 5257, 5260, |
| | | PHKG1, PHKG2 | 5261 |
| | Glycogen storage disease type XI | SLC2A2 | 6514 |
| | Glycogen storage disease type XII | ALDOA | 226 |
| | Glycogen storage disease type XIII | ENO1, ENO2, ENO3 | 2023, 2026, 2027 |
| | Glycogen storage disease type 0 | GYS1, GYS2 | 2997, 2998 |
| | Pyruvate carboxylase deficiency | PC | 5091 |
| | Pyruvate kinase deficiency | PKLR | 5313 |
| | Transaldolase deficiency | TALDO1 | 6888 |
| | Triosephosphate isomerase | TPI1 | 7167 |
| | deficiency | | |
| | Fructose bisphosphatase | FBP1 | 2203 |
| | deficiency | | |
| | Hyperoxaluria | AGXT, GRHPR | 189, 9380 |
| | Hexokinase deficiency | HK1 | 3098 |
| | Glucose-galactose malabsorption | SLC5A1 | 6523 |
| | Glucose-6-phosphate | G6PD | 2539 |
| | dehydrogenase deficiency | | |
| Disorders of | Alkaptonuria | HGD | 3081 |
| amino acid | Aspartylglucosaminuria | AGA | 175 |
| metabolism | Methylmalonic acidemia | MUT, MCEE, MMAA, | 4594, 84693, 166785, |
| | | MMAB, MMACHC, | 326625, 25974, 27249, |
| | | MMADHC, LMBRD1 | 55788 |
| | Maple syrup urine disease | BCKDHA, BCKDHB, DBT | 593, 594, 1629, 1738 |
| | | DLD | |
| | Homocystinuria | CBS | 875 |
| | Tyrosinemia | FAH, TAT, HPD | 2184, 6898, 3242 |
| | Trimethylaminuria | FMO3 | 2328 |
| | Hartnup disease | SLC6A19 | 340024 |
| | Biotinidase deficiency | BTD | 686 |
| | Ornithine carbamoyltransferase | OTC | 5009 |
| | deficiency | | |
| | Carbamoyl-phosphate synthase I | CPS1 | 1373 |
| | deficiency disease | | |
| | Citrullinemia | ASS, SLC25A13 | 445, 10165 |
| | Hyperargininemia | ARG1 | 383 |
| | Hyperhomocysteinemia | MTHFR | 4524 |
| | Hypermethioninemia | MAT1A, GNMT, AHCY | 4143, 27232, 191 |
| | Hyperlysinemias | AASS | 10157 |
| | Nonketotic hyperglycinemia | GLDC, AMT, GCSH | 2731, 275, 2653 |
| | Propionic acidemia | PCCA, PCCB | 5095, 5096 |
| | Hyperprolinemia | ALDH4A1, PRODH | 8659, 5625 |
| | Cystinuria | SLC3A1, SLC7A9 | 6519, 11136 |
| | Dicarboxylic aminoaciduria | SLC1A1 | 6505 |
| | Glutaric acidemia type 2 | ETFB, ETFDH | 2108, 2109, 2110 |
| | Isovaleric acidemia | IVD | 3712 |
| | 2-Hydroxyglutaric aciduria | L2HGDH, D2HGDH | 79944, 728294 |
| Disorders of | N-Acetylglutamate synthase | NAGS | 162417 |
| the urea cycle | deficiency | | |
| | Argininosuccinic aciduria | ASL | 435 |
| | Argininemia | ARG1 | 383 |
| Disorders of | Very long-chain acyl-coenzyme A | ACADVL | 37 |
| fatty acid | dehydrogenase deficiency | | |
| metabolism | Long-chain 3-hydroxyacyl- | HADHA | 3030 |
| | coenzyme A dehydrogenase | | |
| | deficiency | | |
| | Medium-chain acyl-coenzyme A | ACADM | 34 |
| | dehydrogenase deficiency | | |
| | Short-chain acyl-coenzyme A | ACADS | 35 |
| | dehydrogenase deficiency | | |
| | 3-hydroxyacyl-coenzyme A | HADH | 3033 |
| | dehydrogenase deficiency | | |
| | 2,4 Dienoyl-CoA reductase | NADK2 | 133686 |
| | deficiency | | |
| | 3-Hydroxy-3-methylglutaryl-CoA | HMGCL | 3155 |
| | lyase deficiency | | |
| | Malonyl-CoA decarboxylase | MLYCD | 23417 |
| | deficiency | | |
| | Systemic primary carnitine | SLC22A5 | 6584 |
| | deficiency | | |
| | Carnitine-acylcarnitine translocase | SLC25A20 | 788 |
| | deficiency | | |
| | Carnitine palmitoyltransferase I | CPT1A | 1374 |
| | deficiency | | |
| | Carnitine palmitoyltransferase II | CPT2 | 1376 |
| | deficiency | | |
| | Lysosomal acid lipase deficiency | LIPA | 3988 |
| | Gaucher's disease | GBA | 2629 |
| Disorders of | Acute intermittent porphyria | HMBS | 3145 |
| porphyrin | Gunther disease | UROS | 7390 |
| metabolism | Porphyria cutanea tarda | UROD | 7389 |
| | Hepatoerythropoietic porphyria | UROD | 7389 |
| | Hereditary coproporphyria | CPOX | 1371 |
| | Variegate porphyria | PPOX | 5498 |
| | Erythropoietic protoporphyria | FECH | 2235 |
| | Aminolevulinic acid dehydratase | ALAD | 210 |
| | deficiency porphyria | | |
| Lysosomal | Farber disease | ASAH1 | 427 |
| storage | Krabbe disease | GALC | 2581 |
| disorders | Galactosialidosis | CTSA | 5476 |
| | Fabry disease | GLA | 2717 |
| | Schindler disease | NAGA | 4668 |
| | GM1 gangliosidosis | GLB1 | 2720 |
| | Tay-Sachs disease | HEXA | 3073 |
| | Sandhoff disease | HEXB | 3074 |
| | GM2-gangliosidosis, AB variant | GM2A | 2760 |
| | Niemann-Pick disease | SMPD1, NPC1, NPC2 | 6609, 4864, 10577 |
| | Metachromatic leukodystrophy | ARSA, PSAP | 410, 5660 |
| | Multiple sulfatase deficiency | SUMF1 | 285362 |
| | Hurler syndrome | IDUA | 3425 |
| | Hunter syndrome | IDS | 3423 |
| | Sanfilippo syndrome | SGSH, NAGLU, | 6448, 4669, 138050, 2799 |
| | | HGSNAT, GNS | |
| | Morquio syndrome | GALNS, GLB1 | 2588, 2720 |
| | Maroteaux-Lamy syndrome | ARSB | 411 |
| | Sly syndrome | GUSB | 2990 |
| | Sialidosis | NEU1, NEU2, NEU3, | 4758, 4759, 10825, |
| | | NEU4 | 129807 |
| | I-cell disease | GNPTAB, GNPTG | 79158, 84572 |
| | Mucolipidosis type IV | MCOLN1 | 57192 |
| | Infantile neuronal ceroid | PPT1, PPT2 | 5538, 9374 |
| | lipofuscinosis | | |
| | Jansky-Bielschowsky disease | TPP1 | 1200 |
| | Batten disease | CLN1, CLN2, CLN3, | 5538, 1200, 1201, 1203, |
| | | CLN5, CLN6, MFSD8, | 54982, 256471, 2055, |
| | | CLN8, CTSD | 1509 |
| | Kufs disease, Type A | CLN6, PPT1 | 54982, 5538 |
| | Kufs disease, Type B | DNAJC5, CTSF | 80331, 8722 |
| | Alpha-mannosidosis | MAN2B1, MAN2B2, | 4125, 23324, 4123 |
| | | MAN2C1 | |
| | Beta-mannosidosis | MANBA | 4226 |
| | Fucosidosis | FUCA1 | 2517 |
| | Cystinosis | CTNS | 1497 |
| | Pycnodysostosis | CTSK | 1513 |
| | Salla disease | SLC17A5 | 26503 |
| | Infantile free sialic acid storage | SLC17A5 | 26503 |
| | disease | | |
| | Danon disease | LAMP2 | 3920 |
| Peroxisome | Zellweger syndrome | PEX1, PEX2, PEX3, | 5189, 5828, 8504, 5830, |
| biogenesis | | PEX5, PEX6, PEX12 | 5190, 5193, 5195, 55670 |
| disorders | | PEX14, PEX26 | |
| | Infantile Refsum disease | PEX1, PEX2, PEX26 | 5189, 5828, 55670 |
| | Neonatal adrenoleukodystrophy | PEX5, PEX1, PEX10, | 5830, 5189, 5192, 5194, |
| | | PEX13, PEX26 | 55670 |
| | RCDP Type 1 | PEX7 | 5191 |
| | Pipecolic acidemia | PAHX | 5264 |
| | Acatalasia | CAT | 847 |
| | Hyperoxaluria type 1 | AGXT | 189 |
| | Acyl-CoA oxidase deficiency | ACOX1 | 51 |
| | D-bifunctional protein deficiency | HSD17B4 | 3295 |
| | Dihydroxyacetonephosphate | GNPAT | 8443 |
| | acyltransferase deficiency | | |
| | X-linked adrenoleukodystrophy | ABCD1 | 215 |
| | α-Methylacyl-CoA racemase | AMACR | 23600 |
| | deficiency | | |
| | RCDP Type 2 | DHAPAT | 8443 |
| | RCDP Type 3 | AGPS | 8540 |
| | Adult Refsum disease-1 | PHYH | 5264 |
| Mulibrey nanism | TRIM37 | 4591 | |
| Disorders of | Lesch-Nyhan syndrome | HPRT | 3251 |
| purine or | Adenine phosphoribosyltransferase | APRT | 353 |
| pyrimidine | deficiency | | |
| metabolism | Adenosine deaminase deficiency | ADA | 100 |
| | Adenosine monophosphate | AMPD1 | 270 |
| | deaminase deficiency type 1 | | |
| | Adenylosuccinate lyase deficiency | ADSL | 158 |
| | Dihydropyrimidine dehydrogenase | DPYD | 1806 |
| | deficiency | | |
| | Miller syndrome | DHODH | 1723 |
| | Orotic aciduria | UMPS | 7372 |
| | Purine nucleoside phosphorylase | PNP | 4860 |
| | deficiency | | |
| | Xanthinuria | XDH, MOCS1, MOCS2, | 7498, 4337, 4338, 10243 |
| | | GEPH | |

[0394] The Entrez entries listed in the table above are hereby incorporated by reference in their entireties.

[0395] Additional illustrative targets of the present invention include the cosmetic targets listed in Table 6 of International Patent Publication No. WO 2013/151671, the contents of which are hereby incorporated by reference in their entirety.

[0396] Further, in some embodiments, the present methods and compositions find use in targeting any of the proteins or in treatment of any of the diseases or disorders of Table 2A, Table 2B, and/or Table 2C. In various embodiments, the present invention contemplates the targeting of the full-length and/or truncated forms of any of the proteins disclosed in Table 2B. In various embodiments, the present invention contemplates the targeting of the precursor forms and/or mature forms and/or isoforms of any of the proteins disclosed in Table 2A, Table 2B, and/or Table 2C.

[0397] In various embodiments, the present invention contemplates the targeting of a protein having about 60% (e.g. about 60%, or about 61%, or about 62%, or about 63%, or about 64%, or about 65%, or about 66%, or about 67%, or about 68%, or about 69%, or about 70%, or about 71%, or about 72%, or about 73%, or about 74%, or about 75%, or about 76%, or about 77%, or about 78%, or about 79%, or about 80%, or about 81%, or about 82%, or about 83%, or about 84%, or about 85%, or about 86%, or about 87%, or about 88%, or about 89%, or about 90%, or about 91%, or about 92%, or about 93%, or about 94%, or about 95%, or about 96%, or about 97%, or about 98%, or about 99%) sequence identity with any of the protein sequences disclosed herein (e.g. in Table 2A, Table 2B, and/or Table 2C).

[0398] In various embodiments, the present invention contemplates the targeting of a protein comprising an amino acid sequence having one or more amino acid mutations relative to any of the protein sequences described herein (e.g. in Table 2A, Table 2B, and/or Table 2C). For example, the present invention contemplates the targeting of a protein comprising an amino acid sequence having 1, or 2, or 3, or 4, or 5, or 6, or 7, or 8, or 9, or 10, or 11, or 12 amino acid mutations relative to any of the protein sequences described herein (e.g. in Table 2A, Table 2B, and/or Table 2C). In embodiments, the one or more amino acid mutations may be independently selected from substitutions, insertions, deletions, and truncations.

[0399] In embodiments, the amino acid mutations are amino acid substitutions, and may include conservative and/or non-conservative substitutions.

[0400] “Conservative substitutions” may be made, for instance, on the basis of similarity in polarity, charge, size, solubility, hydrophobicity, hydrophilicity, and/or the amphipathic nature of the amino acid residues involved. The 20 naturally occurring amino acids can be grouped into the following six standard amino acid groups: (1) hydrophobic: Met, Ala, Val, Leu, Ile; (2) neutral hydrophilic: Cys, Ser, Thr; Asn, Gln; (3) acidic: Asp, Glu; (4) basic: His, Lys, Arg; (5) residues that influence chain orientation: Gly, Pro; and (6) aromatic: Trp, Tyr, Phe.

[0401] As used herein, “conservative substitutions” are defined as exchanges of an amino acid by another amino acid listed within the same group of the six standard amino acid groups shown above. For example, the exchange of Asp by Glu retains one negative charge in the so modified polypeptide. In addition, glycine and proline may be substituted for one another based on their ability to disrupt α-helices.

[0402] As used herein, “non-conservative substitutions” are defined as exchanges of an amino acid by another amino acid listed in a different group of the six standard amino acid groups (1) to (6) shown above.

[0403] In various embodiments, the substitutions may also include non-classical amino acids (e.g. selenocysteine, pyrrolysine, N-formylmethionine β-alanine, GABA and δ-Aminolevulinic acid, 4-aminobenzoic acid (PABA), D-isomers of the common amino acids, 2,4-diaminobutyric acid, α-amino isobutyric acid, 4-aminobutyric acid, Abu, 2-amino butyric acid, γ-Abu, ε-Ahx, 6-amino hexanoic acid, Aib, 2-amino isobutyric acid, 3-amino propionic acid, ornithine, norleucine, norvaline, hydroxyproline, sarcosme, citrulline, homocitrulline, cysteic acid, t-butylglycine, t-butylalanine, phenylglycine, cyclohexylalanine, β-alanine, fluoro-amino acids, designer amino acids such as β methyl amino acids, C α-methyl amino acids, N α-methyl amino acids, and amino acid analogs in general).

### Methods of Manufacture

[0404] Chemical synthetic methods of the present compounds (e.g. of Formulae I-XVI) and/or pharmaceutical compositions and/or lipid aggregates and/or lipid carriers are described elsewhere herein.

[0405] The methods and compositions of the invention make use of certain cationic lipids, the synthesis, preparation and characterization of which is described elsewhere herein and in the accompanying Examples. In addition, the present invention provides methods of preparing lipid aggregates and/or lipid carriers, including those associated with a therapeutic agent, e.g., a nucleic acid.

[0406] In embodiments, the present lipid aggregates and/or lipid carriers, e.g. liposomes, are created using microfluidics. In embodiments, the present lipid aggregates and/or lipid carriers are manufactured using a Nanoassemblr instrument (Precision Nanosystems). In embodiments, syringe pumps are used to mix organic and aqueous solutions at a specified flowrate. Optionally, the ratio of the flowrate of the aqueous solution to that of the organic solution may be selected from about 1:1, about 2:1, about 3:1, about 4:1, about 5:1, about 6:1, about 8:1, or about 10:1. In embodiments, the organic solution comprises one or more of ethanol, acetone, acetonitrile, dimethyl sulfoxide, toluene, and chloroform, or a mixture thereof. In other embodiments, other solvents are used.

[0407] In embodiments, the present lipid aggregates and/or lipid carriers are manufactured by dropwise mixture of one solution into another. In embodiments, the present lipid aggregates and/or lipid carriers are manufactured with a spray mechanism, or by solvent evaporation, or by sonication, or by extrusion through one or more membranes, or through a process of self-assembly, or by a combination of methods.

[0408] In the methods described herein, a mixture of lipids is combined with a buffered aqueous solution of nucleic acid to produce an intermediate mixture containing nucleic acid encapsulated in lipid particles wherein the encapsulated nucleic acids are present in a nucleic acid/lipid ratio of about 3 wt % to about 25 wt %, e.g. 5 to 15 wt %. The intermediate mixture may optionally be sized to obtain lipid-encapsulated nucleic acid particles wherein the lipid portions are unilamellar vesicles, e.g. having a diameter of 30 to 150 nm, e.g. about 40 to 90 nm. The pH is then raised to neutralize at least a portion of the surface charges on the lipid-nucleic acid particles, thus providing an at least partially surface-neutralized lipid-encapsulated nucleic acid composition.

[0409] Several cationic lipids are amino lipids that are charged at a pH below the pKa of the amino group and substantially neutral at a pH above the pKa. These cationic lipids are termed titratable cationic lipids and can be used in the present compounds (e.g. of Formulae I-XVI) and/or pharmaceutical compositions and/or lipid aggregates and/or lipid carriers using a two-step process. First, lipid vesicles can be formed at the lower pH with titratable cationic lipids and other vesicle components in the presence of nucleic acids. In this manner, the vesicles will encapsulate and entrap the nucleic acids. Second, the surface charge of the newly formed vesicles can be neutralized by increasing the pH of the medium to a level above the pKa of the titratable cationic lipids present, i.e., to physiological pH or higher. Particularly advantageous aspects of this process include both the facile removal of any surface adsorbed nucleic acid and a resultant nucleic acid delivery vehicle which has a neutral surface. The present compounds (e.g. of Formulae I-XVI) and/or pharmaceutical compositions and/or lipid aggregates and/or lipid carriers and/or liposomes and/or lipid particles having a neutral surface are expected to avoid rapid clearance from circulation and to avoid certain toxicities which are associated with cationic liposome preparations. Additional details concerning these uses of such titratable cationic lipids in the formulation of nucleic acid-lipid particles are provided in U.S. Pat. Nos. 6,287,591 and 6,858,225, incorporated herein by reference.

[0410] Vesicles formed in this manner provide formulations of uniform vesicle size with high content of nucleic acids. Additionally, the vesicles have a size range of from about 30 to about 150 nm, e.g. about 30 to about 90 nm. Without intending to be bound by any particular theory, it is believed that the very high efficiency of nucleic acid encapsulation is a result of electrostatic interaction at low pH. At acidic pH (e.g. pH 4.0) the vesicle surface is charged and binds a portion of the nucleic acids through electrostatic interactions. When the external acidic buffer is exchanged for a more neutral buffer (e.g., pH 7.5) the surface of the lipid particle or liposome is neutralized, allowing any external nucleic acid to be removed. More detailed information on the formulation process is provided in various publications (e.g., U.S. Pat. Nos. 6,287,591 and 6,858,225).

[0411] The present invention provides, in embodiments, methods of preparing lipid/nucleic acid formulations. In the methods described herein, a mixture of lipids is combined with a buffered aqueous solution of nucleic acid to produce an intermediate mixture containing nucleic acid encapsulated in lipid particles, e.g., wherein the encapsulated nucleic acids are present in a nucleic acid/lipid ratio of about 10 wt % to about 50 wt %. The intermediate mixture may optionally be sized to obtain lipid-encapsulated nucleic acid particles wherein the lipid portions are unilamellar vesicles, e.g. having a diameter of 30 to 150 nm, or about 40 to 90 nm. The pH is then raised to neutralize at least a portion of the surface charges on the lipid-nucleic acid particles, thus providing an at least partially surface-neutralized lipid-encapsulated nucleic acid composition.

[0412] In embodiments, the mixture of lipids includes at least two lipid components: a first lipid component of the present invention that is selected from among lipids which have a pKa such that the lipid is cationic at pH below the pKa and neutral at pH above the pKa, and a second lipid component that is selected from among lipids that prevent particle aggregation during lipid-nucleic acid particle formation. In embodiments, the amino lipid is a novel cationic lipid of the present invention.

[0413] In preparing the nucleic acid-lipid particles of the invention, the mixture of lipids is typically a solution of lipids in an organic solvent. This mixture of lipids can then be dried to form a thin film or lyophilized to form a powder before being hydrated with an aqueous buffer to form liposomes. Alternatively, in a method, the lipid mixture can be solubilized in a water miscible alcohol, such as ethanol, and this ethanolic solution added to an aqueous buffer resulting in spontaneous liposome formation. In embodiments, the alcohol is used in the form in which it is commercially available. For example, ethanol can be used as absolute ethanol (100%), or as 95% ethanol, the remainder being water. This method is described in more detail in U.S. Pat. No. 5,976,567, the entirety of which is incorporated herein by reference.

[0414] In embodiments, the mixture of lipids is a mixture of cationic lipids, neutral lipids (other than a cationic lipid), a sterol (e.g., cholesterol) and a PEG-modified lipid (e.g., a PEG-DMG or PEG-DMA) in an alcohol solvent. In embodiments, the lipid mixture consists essentially of a cationic lipid, a neutral lipid, cholesterol and a PEG-modified lipid in alcohol, e.g. ethanol. In embodiments, the first solution consists of the above lipid mixture in molar ratios of about 20-70% cationic lipid: 5-45% neutral lipid:20-55% cholesterol:0.5-15% PEG-modified lipid. In embodiments, the first solution consists essentially of a lipid chosen from Table 1, DSPC, Chol and PEG-DMG or PEG-DMA, e.g. in a molar ratio of about 20-60% cationic lipid:5-25% DSPC:25-55% Choi:0.5-15% PEG-DMG or PEG-DMA. In embodiments, the molar lipid ratio is approximately 40/10/40/10 (mol % cationic lipid/DSPC/Chol/PEG-DMG or PEG-DMA), 35/15/40/10 (mol % cationic lipid/DSPC/Chol/PEG-DMG or PEG-DMA) or 52/13/30/5 (mol % cationic lipid/DSPC/Chol/PEG-DMG or PEG-DMA). In embodiments, the neutral lipid in these compositions is replaced with POPC, DPPC, DOPE or SM.

[0415] In embodiments, the lipid mixture is combined with a buffered aqueous solution that may contain the nucleic acids. The buffered aqueous solution of is typically a solution in which the buffer has a pH of less than the pKa of the protonatable lipid in the lipid mixture. Examples of suitable buffers include citrate, phosphate, acetate, and MES. Buffers will be in the range of 1-1000 mM of the anion, depending on the chemistry of the nucleic acid being encapsulated, and optimization of buffer concentration may be significant to achieving high loading levels (see, e.g., U.S. Pat. Nos. 6,287,591 and 6,858,225). Alternatively, pure water acidified to pH 5-6 with chloride, sulfate or the like may be useful. In this case, it may be suitable to add 5% glucose, or another non-ionic solute which will balance the osmotic potential across the particle membrane when the particles are dialyzed to remove ethanol, increase the pH, or mixed with a pharmaceutically acceptable carrier such as normal saline. The amount of nucleic acid in buffer can vary, but will typically be from about 0.01 mg/mL to about 200 mg/mL, e.g. from about 0.5 mg/mL to about 50 mg/mL.

[0416] The mixture of lipids and the buffered aqueous solution of therapeutic nucleic acids is combined to provide an intermediate mixture. The intermediate mixture is typically a mixture of lipid particles having encapsulated nucleic acids. Additionally, the intermediate mixture may also contain some portion of nucleic acids which are attached to the surface of the lipid particles (liposomes or lipid vesicles) due to the ionic attraction of the negatively-charged nucleic acids and positively-charged lipids on the lipid particle surface (the amino lipids or other lipid making up the protonatable first lipid component are positively charged in a buffer having a pH of less than the pKa of the protonatable group on the lipid). In embodiments, the mixture of lipids is an alcohol solution of lipids and the volumes of each of the solutions is adjusted so that upon combination, the resulting alcohol content is from about 20% by volume to about 45% by volume. The method of combining the mixtures can include any of a variety of processes, often depending upon the scale of formulation produced. For example, when the total volume is about 10-20 mL or less, the solutions can be combined in a test tube and stirred together using a vortex mixer. Large-scale processes can be carried out in suitable production scale glassware.

[0417] Optionally, the lipid-encapsulated therapeutic agent (e.g., nucleic acid) complexes which are produced by combining the lipid mixture and the buffered aqueous solution of therapeutic agents (e.g. nucleic acids) can be sized to achieve a desired size range and relatively narrow distribution of lipid particle sizes. In embodiments, the compositions provided herein will be sized to a mean diameter of from about 70 to about 200 nm, e.g. about 90 to about 130 nm. Several techniques are available for sizing liposomes to a desired size. One sizing method is described in U.S. Pat. No. 4,737,323, the entirety of which is incorporated herein by reference. Sonicating a liposome suspension either by bath or probe sonication produces a progressive size reduction down to small unilamellar vesicles (SUVs) less than about 0.05 microns in size. Homogenization is another method which relies on shearing energy to fragment large liposomes into smaller ones. In a typical homogenization procedure, multilamellar vesicles are recirculated through a standard emulsion homogenizer until selected liposome sizes, typically between about 0.1 and 0.5 microns, are observed. In both methods, the particle size distribution can be monitored by conventional laser-beam particle size determination. For certain methods herein, extrusion is used to obtain a uniform vesicle size.

[0418] Extrusion of liposome compositions through a small-pore polycarbonate membrane or an asymmetric ceramic membrane results in a relatively well-defined size distribution. Typically, the suspension is cycled through the membrane one or more times until the desired liposome complex size distribution is achieved. The liposomes may be extruded through successively smaller-pore membranes, to achieve a gradual reduction in liposome size. In some instances, the lipid-nucleic acid compositions which are formed can be used without any sizing.

[0419] In embodiments, methods of the present invention further comprise a step of neutralizing at least some of the surface charges on the lipid portions of the lipid-nucleic acid compositions. By at least partially neutralizing the surface charges, unencapsulated nucleic acid is freed from the lipid particle surface and can be removed from the composition using conventional techniques. In embodiments, unencapsulated and surface adsorbed nucleic acids are removed from the resulting compositions through exchange of buffer solutions. For example, replacement of a citrate buffer (pH about 4.0, used for forming the compositions) with a HEPES-buffered saline (HBS pH about 7.5) solution, results in the neutralization of liposome surface and nucleic acid release from the surface. The released nucleic acid can then be removed via chromatography using standard methods, and then switched into a buffer with a pH above the pKa of the lipid used.

[0420] Optionally the lipid vesicles (i.e., lipid particles) can be formed by hydration in an aqueous buffer and sized using any of the methods described above prior to addition of the nucleic acid. As described above, the aqueous buffer should be of a pH below the pKa of the amino lipid. A solution of the nucleic acids can then be added to these sized, preformed vesicles. To allow encapsulation of nucleic acids into such pre-formed vesicles the mixture should contain an alcohol, such as ethanol. In the case of ethanol, it should be present at a concentration of about 20% (w/w) to about 45% (w/w).

[0421] In addition, it may be necessary to warm the mixture of pre-formed vesicles and nucleic acid in the aqueous buffer-ethanol mixture to a temperature of about 25° C. to about 50° C. depending on the composition of the lipid vesicles and the nature of the nucleic acid. It will be apparent to one of ordinary skill in the art that optimization of the encapsulation process to achieve a desired level of nucleic acid in the lipid vesicles will require manipulation of variable such as ethanol concentration and temperature. Once the nucleic acids are encapsulated within the performed vesicles, the external pH can be increased to at least partially neutralize the surface charge. Unencapsulated and surface adsorbed nucleic acids can then be removed.

### Vaccines and Adjuvants

[0422] In some embodiments, the compounds and compositions of the present invention are associated with a protein or nucleic acid antigen composition. For instance, the present lipids (e.g. any one of Formulae I-XVI) may be associated with a protein or nucleic acid vaccine antigen (e.g. any of the proteins of interest described herein). For instance, the present invention may relate to a method of vaccinating against a disease, inclusive of any of the infectious disease described herein, by administering a present lipids (e.g. any one of Formulae I-XVI) in association with a protein or nucleic acid antigen composition (e.g. any of the proteins of interest described herein).

[0423] In embodiments, the protein or nucleic acid antigen is an betacoronavirus protein or an alphacoronavirus protein, or an antigenic fragment thereof, or a nucleic acid (e.g. RNA (e.g. mRNA) or DNA) encoding the same. In some embodiments, the betacoronavirus protein is selected from a SARS-CoV-2, SARS-CoV, MERS-CoV, HCoV-HKU1, and HCoV-0043 protein, or an antigenic fragment thereof, or a nucleic acid (e.g. RNA (e.g. mRNA) or DNA) encoding the same. In some embodiments, the alphacoronavirus protein is selected from a HCoV-NL63 and HCoV-229E protein, or an antigenic fragment thereof, or a nucleic acid (e.g. RNA (e.g. mRNA) or DNA) encoding the same.

[0424] In some embodiments, the protein or nucleic acid antigen is a coronavirus protein, or an antigenic fragment thereof, or a nucleic acid (e.g. RNA (e.g. mRNA) or DNA) encoding the same. In various embodiments, the coronavirus protein is a protein from SARS-CoV-2, such as, e.g., SARS-CoV-2 spike protein. In embodiments, the SARS-CoV-2 protein is selected from spike surface glycoprotein, membrane glycoprotein M, envelope protein E, and nucleocapsid phosphoprotein N, or an antigenic fragment thereof, or a nucleic acid (e.g. RNA (e.g. mRNA) or DNA) encoding the same. In embodiments, the SARS-CoV-2 protein selected from spike surface glycoprotein comprises S1, S2 and S2′.

[0425] In some embodiments, the coronavirus is a betacoronavirus or an alphacoronavirus. In some embodiments, the betacoronavirus is selected from a SARS-CoV-2, SARS-CoV, MERS-CoV, HCoV-HKU1, and HCoV-0043. In embodiments, the alphacoronavirus is selected from a HCoV-NL63 and HCoV-229E. In embodiments, the coronavirus is severe acute respiratory syndrome coronavirus 2 (SARS-CoV-2).

[0426] In embodiments, the protein or nucleic acid antigen is an influenza viral antigen, optionally selected from hemagglutinin (HA) protein, matrix 2 (M2) protein, and neuraminidase, or an antigenic fragment thereof, or a nucleic acid (e.g. RNA (e.g. mRNA) or DNA) encoding the same.

[0427] In embodiments, the disease or disorder for which vaccination is occurring is selected from diphtheria, tetanus, pertussis, influenza, pneumonia, hepatitis A, hepatitis B, polio, yellow fever, Human Papillomavirus (HPV) infection, anthrax, rabies, Japanese Encephalitis, meningitis, measles, mumps, rubella, gastroenteritis, smallpox, typhoid fever, varicella (chickenpox), rotavirus, and shingles. In some embodiments, the present invention relates to the treatment of hepatitis. Illustrative hepatitis that may be treated include, but is not limited to, hepatitis A, hepatitis B, hepatitis C, hepatitis D, hepatitis E, autoimmune hepatitis, alcoholic hepatitis, acute hepatitis, and chronic hepatitis.

[0428] In some embodiments, the compounds, compositions, or vaccines of the present invention further comprise an adjuvant, optionally selected from an aluminum gel or salt. In embodiments, the aluminum gel or salt is selected from aluminum hydroxide, aluminum phosphate, and aluminum sulfate. In some embodiments, the adjuvant is a nucleic acid encoding the chimeric protein or chimeric protein complex as described herein.

[0429] In some embodiments, the additional adjuvant is selected from oil-in-water emulsion formulations, saponin adjuvants, ovalbumin, Freunds Adjuvant, cytokines, and chitosans. Illustrative additional adjuvants include, but are not limited to: (1) ovalbumin (e.g. ENDOFIT), which is often used for biochemical studies; (2) oil-in-water emulsion formulations (with or without other specific immunostimulating agents such as muramyl peptides or bacterial cell wall components), such as for example (a) MF59 (PCT Publ. No. WO 90/14837), containing 5% Squalene, 0.5% Tween 80, and 0.5% Span 85 (optionally containing various amounts of MTP-PE) formulated into submicron particles using a microfluidizer such as, for example, Model HOy microfluidizer (Microfluidics, Newton, Mass.), (b) SAF, containing 10% Squalane, 0.4% Tween 80, 5% pluronic-blocked polymer L121, and thr-MDP either microfluidized into a submicron emulsion or vortexed to generate a larger particle size emulsion, (c) RIBI adjuvant system (RAS), (RIBI IMMUNOCHEM, Hamilton, Mo.) containing 2% Squalene, 0.2% Tween 80, and, optionally, one or more bacterial cell wall components from the group of monophosphorylipid A (MPL), trehalose dimycolate (TDM), and cell wall skeleton (CWS), including MPL+CWS (DETOX™); and (d) ADDAVAX (Invitrogen); (3) saponin adjuvants, such as STIMULON (Cambridge Bioscience, Worcester, Mass.) may be used or particles generated therefrom such as ISCOMs (immunostimulating complexes); (4) Complete Freunds Adjuvant (CFA) and Incomplete Freunds Adjuvant (IFA); (5) cytokines, such as interleukins (by way of non-limiting example, IL-1, IL-2, IL-4, IL-5, IL-6, IL-7, IL-12, etc.), interferons (e.g., gamma interferon), macrophage colony stimulating factor (M-CSF), tumor necrosis factor (TNF), etc; (6) chitosans and other derivatives of chitin or poly-N-acetyl-D-glucosamine in which the greater proportion of the N-acetyl groups have been removed through hydrolysis (see, e.g., European Patent Application EP0460020, which is hereby incorporated by reference in its entirety, disclosing pharmaceutical formulations including chitosans as mucosal absorption enhancers); and (7) other substances that act as immunostimulating agents to enhance the effectiveness of the composition, e.g., monophosphoryl lipid A. In other embodiments, the additional adjuvant is one or more of an aluminum salt or gel, a pattern recognition receptors (PRR) agonist, CpG ODNs and imidazoquinolines. In some embodiments, the additional adjuvant is one or more of cyclic [G(3′,5′)pA(3′,5′)p] (e.g. 3′3′-cGAMP VACCIGRADE); cyclic [G(2′,5′)pA(3′,5′)p]2′3′ (e.g. 2′3′ cGAMP VACCIGRADE); cyclic [G(2′,5′)pA(2′,5′)p] (e.g. 2′2′-cGAMP VACCIGRADE), cyclic diadenylate monophosphate (e.g. c-di-AMP VACCIGRADE); cyclic diguanylate monophosphate (e.g. c-di-GMP VACCIGRADE); TLR7 agonist-imidazoquinolines compound (e.g. TLR7 agonists, such as, for example, Gardiquimod VACCIGRADE, Imiquimod VACCIGRADE, R848 VACCIGRADE); lipopolysaccharides (e.g. TLR4 agonists), such as that from E. coli 0111:B4 strain (e.g. LPS-EB VACCIGRADE); monophosphoryl lipid A (e.g. MPLA-SM VACCIGRADE and MPLA Synthetic VACCIGRADE); N-glycolylated muramyldipeptide (e.g. N-Glycolyl-MDP VACCIGRADE); CpG ODN, class A and/oror CpG ODN, class B and/or CpG ODN, class C (e.g. ODN 1585 VACCIGRADE, ODN 1826 VACCIGRADE, ODN 2006 VACCIGRADE, ODN 2395 VACCIGRADE), a triacylated lipoprotein (e.g. Pam3CSK4 VACCIGRADE); Polyinosine-polycytidylic acid (e.g. Poly(I:C) (HMW) VACCIGRADE); and cord factor (i.e. mycobacterial cell wall component trehalose 6,6′ dimycolate (TDM)) or an analog thereof (e.g. TDB VACCIGRADE, TDB-HS15 VACCIGRADE). In some embodiments, the additional adjuvant is a TLR agonist (e.g. TLR1, and/or TLR2, and/or TLR3, and/or TLR4, and/or TLR5, and/or TLR6, and/or TLR7, and/or TLR8, and/or TLR9, and/or TLR10, and/or TLR11, and/or TLR12, and/or TLR13), a nucleotide-binding oligomerization domain (NOD) agonist, a stimulator of interferon genes (STING) ligand, or related agent.

[0430] In some embodiments, the additional adjuvant is one or more of a mineral adjuvant, gel-based adjuvant, tensoactive agent, bacterial product, oil emulsion, particulated adjuvant, fusion protein, and lipopeptide. Other mineral salt adjuvants, besides the aluminum adjuvants described elsewhere, include salts of calcium (e.g. calcium phosphate), iron and zirconium. Other gel-based adjuvants, besides the aluminum gel-based adjuvants described elsewhere, include Acemannan. Tensoactive agents include Quil A, saponin derived from an aqueous extract from the bark of Quillaja saponaria; saponins, tensoactive glycosides containing a hydrophobic nucleus of triterpenoid structure with carbohydrate chains linked to the nucleus, and QS-21. Bacterial products include cell wall peptidoglycan or lipopolysaccharide of Gram-negative bacteria (e.g. from Mycobacterium spp., Corynebacterium parvum, C. granulosum, Bordetella pertussis and Neisseria meningitidis), N-acetyl muramyl-L-alanyl-D-isoglutamine (MDP), different compounds derived from MDP (e.g. threonyl-MDP), lipopolysaccharides (LPS) (e.g. from the cell wall of Gram-negative bacteria), trehalose dimycolate (TDM), and DNA containing CpG motifs. Oil emulsions include FIA, Montanide, Adjuvant 65, Lipovant, the montanide family of oil-based adjuvants, and various liposomes. Among particulated and polymeric systems, poly (DL-lactide-coglycolide) microspheres have been extensively studied and find use herein.

[0431] In some embodiments, the additional adjuvants are described in Jennings et al. Adjuvants and Delivery Systems for Viral Vaccines-Mechanisms and Potential. In: Brown F, Haaheim L R, (eds). Modulation of the Immune Response to Vaccine Antigens. Dev. Biol. Stand, Vol. 92. Basel: Karger 1998; 19-28 and/or Sayers et al. J Biomed Biotechnol. 2012; 2012: 831486, and/or Petrovsky and Aguilar, Immunology and Cell Biology (2004) 82, 488-496 the contents of which are hereby incorporated by reference in their entireties.

[0432] Administration/Dosage/Excipients Administration of these compositions according to the present invention may be via any common route so long as the target tissue is available via that route. This includes oral, nasal, or buccal. Alternatively, administration may be by intradermal, subcutaneous, intramuscular, intraperitoneal, intraportal or intravenous injection, or by direct injection into diseased, e.g. cancer, tissue. The agents disclosed herein may also be administered by catheter systems. Such compositions would normally be administered as pharmaceutically acceptable compositions as described herein.

[0433] In embodiments, the present compositions are administered parenterally, e.g., intraarticularly, intravenously, intraperitoneally, subcutaneously, or intramuscularly. In embodiments, the pharmaceutical compositions are administered intravenously or intraperitoneally by a bolus injection.

[0434] In some embodiments, lipid-nucleic acid compositions can be administered in an aerosol inhaled into the lungs (see, Brigham, et al., Am. J. Sci. 298(4):278-281 (1989)), optionally by the use of a vibrating-mesh nebulizer (e.g., without limitation, AEROGEN SOLO (Galway, Ireland)). In some embodiments, the lipid-nucleic acid compositions can be administered by direct injection at the site of disease (Culver, Human Gene Therapy, MaryAnn Liebert, Inc., Publishers, New York. pp. 70-71 (1994)).

[0435] Administration of the compositions described herein may be, for example, by injection, topical administration, ophthalmic administration, and intranasal administration. The injection, in some embodiments, may be linked to an electrical force (e.g. electroporation, including with devices that find use in electrochemotherapy (e.g. CLINIPORATOR, IGEA Srl, Carpi [MO], Italy)). The topical administration may be, but is not limited to, a cream, lotion, ointment, gel, spray, solution and the like. The topical administration may further include a penetration enhancer such as, but not limited to, surfactants, fatty acids, bile salts, chelating agents, non-chelating non-surfactants, polyoxyethylene-9-lauryl ether, polyoxyethylene-20-cetyl ether, fatty acids and/or salts in combination with bile acids and/or salts, sodium salt in combination with lauric acid, capric acid and UDCA, and the like. The topical administration may also include a fragrance, a colorant, a sunscreen, an antibacterial, and/or a moisturizer. The compositions described herein may be administered to at least one site such as, but not limited to, forehead, scalp, hair follicles, hair, upper eyelids, lower eyelids, eyebrows, eyelashes, infraorbital area, periorbital areas, temple, nose, nose bridge, cheeks, tongue, nasolabial folds, lips, periobicular areas, jaw line, ears, neck, breast, forearm, upper arm, palm, hand, finger, nails, back, abdomen, sides, buttocks, thigh, calf, feet, toes and the like.

[0436] Routes of administration include, for example: intradermal, intramuscular, intraperitoneal, intravenous, subcutaneous, intranasal, epidural, oral, sublingual, intracerebral, intravaginal, transdermal, intraportal, rectally, by inhalation, or topically, particularly to the ears, nose, eyes, or skin. In embodiments, the administering is effected orally or by parenteral injection.

[0437] Upon formulation, solutions may be administered in a manner compatible with the dosage formulation and in such amount as is therapeutically effective, as described herein. The formulations may easily be administered in a variety of dosage forms such as injectable solutions, drug release capsules and the like. For parenteral administration in an aqueous solution, for example, the solution generally is suitably buffered and the liquid diluent first rendered isotonic with, for example, sufficient saline or glucose. Such aqueous solutions may be used, for example, for intravenous, intramuscular, subcutaneous, and intraperitoneal administration. Preferably, sterile aqueous media are employed as is known to those of skill in the art, particularly in light of the present disclosure.

[0438] In embodiments, the nucleic acid and present lipids is administered locally, optionally by one or more of subcutaneous injection, intradermal injection, subdermal injection and intramuscular injection, and the effective dose is administered to a surface area of about 4 mm² to about 150 mm² (e.g. about, or no more than about, 4 mm², or about 5 mm², or about 6 mm², or about 7 mm², or about 8 mm², or about 10 mm², or about 20 mm², or about 50 mm², or about 100 mm², or about 150 mm²). In various embodiments, the nucleic acid and present lipids is administered locally, optionally by one or more of subcutaneous injection, intradermal injection, subdermal injection and intramuscular injection, and the effective dose administered to a surface area of no more than about 4 mm², or about 5 mm², or about 6 mm², or about 7 mm², or about 8 mm², or about 10 mm², or about 20 mm², or about 50 mm², or about 100 mm², or about 150 mm².

[0439] In various embodiments, the nucleic acid and present lipids is administered locally, optionally by one or more of subcutaneous injection, intradermal injection, subdermal injection and intramuscular injection, and the effective dose administered to a surface area of about 4 mm², or about 5 mm², or about 6 mm², or about 7 mm², or about 8 mm², or about 10 mm², or about 20 mm², or about 50 mm², or about 100 mm², or about 150 mm².

[0440] In various embodiments, the nucleic acid and present lipids is administered locally, optionally by one or more of subcutaneous injection, intradermal injection, subdermal injection and intramuscular injection, and the effective dose (weight RNA/surface area of injection) is about 35 ng/cm² to about 7000 ng/cm². In various embodiments, the nucleic acid and present lipids is administered locally, optionally by one or more of subcutaneous injection, intradermal injection, subdermal injection and intramuscular injection, and the effective dose (weight RNA/surface area of injection) is no more than about 35 ng/cm², or about 50 ng/cm², or about 75 ng/cm², or about 100 ng/cm², or about 125 ng/cm², or about 150 ng/cm², or about 175 ng/cm², or about 200 ng/cm², or about 225 ng/cm², or about 250 ng/cm², or about 500 ng/cm², or about 1000 ng/cm², or about 2000 ng/cm², or about 5000 ng/cm², or about 7000 ng/cm². In various embodiments, nucleic acid and present lipids is administered locally, optionally by one or more of subcutaneous injection, intradermal injection, subdermal injection and intramuscular injection, and the effective dose (weight RNA/surface area of injection) is about 35 ng/cm², or about 50 ng/cm², or about 75 ng/cm², or about 100 ng/cm², or about 125 ng/cm², or about 150 ng/cm², or about 175 ng/cm², or about 200 ng/cm², or about 225 ng/cm², or about 250 ng/cm², or about 500 ng/cm², or about 1000 ng/cm², or about 2000 ng/cm², or about 5000 ng/cm², or about 7000 ng/cm².

[0441] In some embodiments, the effective dose is about 100 ng to about 5000 ng (e.g., about, or no more than about, 100 ng, or 200 ng, or 300 ng, or 400 ng, or 500 ng, or 600 ng, or 700 ng, or 800 ng, or 900 ng, or 1000 ng, or 1100 ng, or 1200 ng, or 1300 ng, or 1400 ng, or 1500 ng, or 1600 ng, or 1700 ng, or 1800 ng, or 1900 ng, or 2000 ng, or 3000 ng, or 4000 ng, or 5000 ng). In other embodiments, the effective dose is less than about 100 ng. In certain embodiments, the effective dose is about 10 ng to about 100 ng (e.g., about, or no more than about, 10 ng, or 20 ng, or 30 ng, or 40 ng, or 50 ng, or 60 ng, or 70 ng, or 80 ng, or 90 ng, or 100 ng).

[0442] In some embodiments, the effective dose is about 1.4 ng/kg to about 30 ng/kg (e.g., about, or no more than about, 1.4 ng/kg, or 2.5 ng/kg, or 5 ng/kg, or 10 ng/kg, or 15 ng/kg, or 20 ng/kg, or 25 ng/kg, or 30 ng/kg. In other embodiments, the effective dose is less than about 1.5 ng/kg. In certain embodiments, the effective dose is about 0.14 ng/kg to about 1.4 ng/kg (e.g., about, or no more than about, 0.14 ng/kg, or 0.25 ng/kg, or 0.5 ng/kg, or 0.75 ng/kg, or 1 ng/kg, or 1.25 ng/kg, or 1.4 ng/kg).

[0443] In some embodiments, the effective dose is about 350 ng/cm² to about 7000 ng/cm² (e.g., about, or no more than about, 350 ng/cm², or 500 ng/cm², or 750 ng/cm², or 1000 ng/cm², or 2000 ng/cm², or 3000 ng/cm², or 4000 ng/cm², or 5000 ng/cm², or 6000 ng/cm², or 7000 ng/cm²). In other embodiments, the effective dose is less than about 350 ng/cm².

[0444] In certain embodiments, the effective dose is about 35 ng/cm² to about 350 ng/cm² (e.g., about, or no more than about, 35 ng/cm², or 50 ng/cm², or 75 ng/cm², or 100 ng/cm², or 150 ng/cm², or 200 ng/cm², or 250 ng/cm², or 300 ng/cm², or 350 ng/cm².

[0445] In some embodiments, the effective dose of the nucleic acid drug, including synthetic RNA, is about 1 ng to about 2000 ng, or about 10 ng to about 2000 ng, or about 100 ng to about 2000 ng, or about 200 ng to about 1900 ng, or about 300 ng to about 1800 ng, or about 400 ng to about 1700 ng, or about 500 ng to about 1600 ng, or about 600 ng to about 1500 ng, or about 700 ng to about 1400 ng, or about 800 ng to about 1300 ng, or about 900 ng to about 1200 ng, or about 1000 ng to about 1100 ng, or about 500 ng to about 2000 ng, or about 500 ng to about 1500 ng, or about 500 ng to about 1000 ng, or about 1000 ng to about 1500 ng, or about 1000 ng to about 2000 ng, or about 1500 ng to about 2000 ng, or about 100 ng to about 500 ng, or about 200 ng to about 400 ng, or about 10 ng to about 100 ng, or about 20 ng to about 90 ng, or about 30 ng to about 80 ng, or about 40 ng to about 70 ng, or about 50 ng to about 60 ng.

[0446] In some embodiments, the effective dose of the nucleic acid drug, including synthetic RNA, is no more than about 1 ng, no more than about 10 ng, no more than about 30 ng, no more than about 50 ng, or about 100 ng, or about 200 ng, or about 300 ng, or about 400 ng, or about 500 ng, or about 600 ng, or about 700 ng, or about 800 ng, or about 900 ng, or about 1000 ng, or about 1100 ng, or about 1200 ng, or about 1300 ng, or about 1400 ng, or about 1500 ng, or about 1600 ng, or about 1700 ng, or about 1800 ng, or about 1900 ng, or about 2000 ng, or about 3000 ng, or about 4000 ng, or about 5000 ng.

[0447] In some embodiments, the effective dose of the nucleic acid drug, including synthetic RNA, is about 1 ng, or about 10 ng, or about 30 ng, or about 50 ng, or about 100 ng, or about 200 ng, or about 300 ng, or about 400 ng, or about 500 ng, or about 600 ng, or about 700 ng, or about 800 ng, or about 900 ng, or about 1000 ng, or about 1100 ng, or about 1200 ng, or about 1300 ng, or about 1400 ng, or about 1500 ng, or about 1600 ng, or about 1700 ng, or about 1800 ng, or about 1900 ng, or about 2000 ng, or about 3000 ng, or about 4000 ng, or about 5000 ng.

[0448] In some embodiments, the effective dose of the nucleic acid drug, including synthetic RNA, is about 0.028 pmol, or about 0.05 pmol, or about 0.1 pmol, or about 0.2 pmol, or about 0.3 pmol, or about 0.4 pmol, or about 0.5 pmol, or about 0.6 pmol, or about 0.7 pmol, or about 0.8 pmol, or about 0.9 pmol, or about 1.0 pmol, or about 1.2 pmol, or about 1.4 pmol, or about 1.6 pmol, or about 1.8 pmol, or about 2.0 pmol, or about 2.2 pmol, or about 2.4 pmol, or about 2.6 pmol, or about 2.8 pmol, or about 3.0 pmol, or about 3.2 pmol, or about 3.4 pmol, or about 3.6 pmol, or about 3.8 pmol, or about 4.0 pmol, or about 4.2 pmol, or about 4.4 pmol, or about 4.6 pmol, or about 4.8 pmol, or about 5.0 pmol, or about 5.5 pmol, or about 5.7 pmol.

[0449] In some embodiments, the nucleic acid drug, including synthetic RNA, is administered at a concentration of about 0.1 nM, or about 0.25 nM, or about 0.5 nM, or about 0.75 nM, or about 1 nM, or about 2.5 nM, or about 5 nM, or about 7.5 nM, or about 10 nM, or about 20 nM, or about 30 nM, or about 40 nM, or about 50 nM, or about 60 nM, or about 70 nM, or about 80 nM, or about 90 nM, or about 100 nM, or about 110 nM, or about 120 nM, or about 150 nM, or about 175 nM, or about 200 nM.

[0450] In some embodiments, the effective dose of the nucleic acid drug is about 350 ng/cm², or about 500 ng/cm², or about 750 ng/cm², or about 1000 ng/cm², or about 2000 ng/cm², or about 3000 ng/cm², or about 4000 ng/cm², or about 5000 ng/cm², or about 6000 ng/cm², or about 7000 ng/cm². In other embodiments, the effective dose is less than about 350 ng/cm². In certain embodiments, the effective dose is about 35 ng/cm², or about 50 ng/cm², or about 75 ng/cm², or about 100 ng/cm², or about 150 ng/cm², or about 200 ng/cm², or about 250 ng/cm², or about 300 ng/cm², or about 350 ng/cm².

[0451] In some embodiments, the effective dose of the nucleic acid drug is about 35 ng/cm² to about 7000 ng/cm², or about 50 ng/cm² to about 5000 ng/cm², or about 100 ng/cm² to about 3000 ng/cm², or about 500 ng/cm² to about 2000 ng/cm², or about 750 ng/cm² to about 1500 ng/cm², or about 800 ng/cm² to about 1200 ng/cm², or about 900 ng/cm² to about 1100 ng/cm².

[0452] In some embodiments, the effective dose of the nucleic acid drug is about 1 picomole/cm², or about 2 picomoles/cm², or about 3 picomoles/cm², or about 4 picomoles/cm², or about 5 picomoles/cm², or about 6 picomoles/cm², or about 7 picomoles/cm², or about 8 picomoles/cm², or about 9 picomoles/cm², or about 10 picomoles/cm², or about 12 picomoles/cm², or about 14 picomoles/cm², or about 16 picomoles/cm², or about 18 picomoles/cm², or about 20 picomoles/cm². In other embodiments, the effective dose is less than about 1 picomole/cm². In certain embodiments, the effective dose is about 0.1 picomoles/cm², or about 0.2 picomoles/cm², or about 0.3 picomoles/cm², or about 0.4 picomoles/cm², or about 0.5 picomoles/cm², or about 0.6 picomoles/cm², or about 0.7 picomoles/cm², or about 0.8 picomoles/cm², or about 0.9 picomoles/cm², or about 1 picomole/cm².

[0453] In some embodiments, the effective dose of the nucleic acid drug is about 0.1 picomoles/cm² to about 20 picomoles/cm², or about 0.2 picomoles/cm² to about 15 picomoles/cm², or about 0.5 picomoles/cm² to about 10 picomoles/cm², or about 0.8 picomoles/cm² to about 8 picomoles/cm², or about 1 picomole/cm² to about 5 picomoles/cm², or about 2 picomoles/cm² to about 4 picomoles/cm².

[0454] For example, the present compositions can be in the form of pharmaceutically acceptable salts. Such salts include those listed in, for example, J. Pharma. Sci. 66, 2-19 (1977) and The Handbook of Pharmaceutical Salts; Properties, Selection, and Use. P. H. Stahl and C. G. Wermuth (eds.), Verlag, Zurich (Switzerland) 2002, which are hereby incorporated by reference in their entirety. Non-limiting examples of pharmaceutically acceptable salts include: sulfate, citrate, acetate, oxalate, chloride, bromide, iodide, nitrate, bisulfate, phosphate, acid phosphate, isonicotinate, lactate, salicylate, acid citrate, tartrate, oleate, tannate, pantothenate, bitartrate, ascorbate, succinate, maleate, gentisinate, fumarate, gluconate, glucaronate, saccharate, formate, benzoate, glutamate, methanesulfonate, ethanesulfonate, benzenesulfonate, p-toluenesulfonate, camphorsulfonate, pamoate, phenylacetate, trifluoroacetate, acrylate, chlorobenzoate, dinitrobenzoate, hydroxybenzoate, methoxybenzoate, methylbenzoate, o-acetoxybenzoate, naphthalene-2-benzoate, isobutyrate, phenylbutyrate, α-hydroxybutyrate, butyne-1,4-dicarboxylate, hexyne-1,4-dicarboxylate, caprate, caprylate, cinnamate, glycollate, heptanoate, hippurate, malate, hydroxymaleate, malonate, mandelate, mesylate, nicotinate, phthalate, teraphthalate, propiolate, propionate, phenylpropionate, sebacate, suberate, p-bromobenzenesulfonate, chlorobenzenesulfonate, ethylsulfonate, 2-hydroxyethylsulfonate, methylsulfonate, naphthalene-1-sulfonate, naphthalene-2-sulfonate, naphthalene-1,5-sulfonate, xylenesulfonate, tartarate salts, hydroxides of alkali metals such as sodium, potassium, and lithium; hydroxides of alkaline earth metal such as calcium and magnesium; hydroxides of other metals, such as aluminum and zinc; ammonia, and organic amines, such as unsubstituted or hydroxy-substituted mono-, di-, or tri-alkylamines, dicyclohexylamine; tributyl amine; pyridine; N-methyl, N-ethylamine; diethylamine; triethylamine; mono-, bis-, or tris-(2-0H-lower alkylamines), such as mono-; bis-, or tris-(2-hydroxyethyl)amine, 2-hydroxy-tert-butylamine, or tris-(hydroxymethyl)methylamine, N,N-di-lower alkyl-N-(hydroxyl-lower alkyl)-amines, such as N,N-dimethyl-N-(2-hydroxyethyl)amine or tri-(2-hydroxyethyl)amine; N-methyl-D-glucamine; and amino acids such as arginine, lysine, and the like.

[0455] The present pharmaceutical compositions can comprise excipients, including liquids such as water and oils, including those of petroleum, animal, vegetable, or synthetic origin, such as peanut oil, soybean oil, mineral oil, sesame oil and the like. The pharmaceutical excipients can be, for example, saline, gum acacia, gelatin, starch paste, talc, keratin, colloidal silica, urea, and the like. In addition, auxiliary, stabilizing, thickening, lubricating, and coloring agents can be used. In one embodiment, the pharmaceutically acceptable excipients are sterile when administered to a subject.

[0456] Suitable pharmaceutical excipients also include starch, glucose, lactose, sucrose, gelatin, malt, rice, flour, chalk, silica gel, sodium stearate, glycerol monostearate, talc, sodium chloride, dried skim milk, glycerol, propylene, glycol, water, ethanol, and the like. Any agent described herein, if desired, can also comprise minor amounts of wetting or emulsifying agents, or pH buffering agents.

### Subjects/Patients/Hosts

[0457] Illustrative subjects or patients or hosts refers to any vertebrate including, without limitation, humans and other primates (e.g., chimpanzees and other apes and monkey species), farm animals (e.g., cattle, sheep, pigs, goats, and horses), domestic mammals (e.g., dogs and cats), laboratory animals (e.g., rodents such as mice, rats, and guinea pigs), and birds (e.g., domestic, wild and game birds such as chickens, turkeys and other gallinaceous birds, ducks, geese, and the like). In embodiments, the subject is a mammal. In embodiments, the subject is a human. In certain embodiments, the subject is an invertebrate. In other embodiments, the subject is a plant.

### Kits

[0458] The invention also provides kits that can simplify the transfection of the nucleic acids described herein. An illustrative kit of the invention comprises one or more of the present compounds (e.g. of Formulae I-XVI) and/or pharmaceutical compositions and/or lipid aggregates and/or lipid carriers. The kit may also include transfection media, transfection reagents, and/or various vessels for culturing of cells.

### Definitions

[0459] The terms “a”, “an”, and “the” as used herein, generally is construed to cover both the singular and the plural forms.

[0460] The term “H” denotes a single hydrogen atom. This radical may be attached, for example, to an oxygen atom to form a hydroxyl radical.

[0461] Where the term “alkyl” is used, either alone or within other terms such as “haloalkyl” or “alkylamino”, it embraces linear or branched radicals having one to about twenty carbon atoms, denoted as C₁-C₂₀ alkyl. Examples of such radicals include methyl, ethyl, n-propyl, isopropyl, n-butyl, isobutyl, sec-butyl, tert-butyl, pentyl, isoamyl, hexyl and the like. The term “alkylenyl,” “alkylene,” or “alkanediyl,” embraces bridging divalent alkyl radicals such as methylenyl or ethylenyl.

[0462] The term “alkenyl” embraces linear or branched radicals of two to about sixty carbon atoms having at least one carbon-carbon double bond. In some instances, the “alkenyl” radical has two carbon-carbon double bonds that may or may not be conjugated. In some instances, the “alkenyl” radical has more than two carbon-carbon double bonds that independently may or may not be conjugated. In some instances, the “alkenyl” radical has at least one carbon-carbon double bond and at least one carbon-carbon triple bond that may or may not be conjugated. Examples of alkenyl radicals include ethenyl, propenyl, allyl, propenyl, butenyl and 4-methylbutenyl. The terms “alkenyl” embraces radicals having “cis” and “trans” orientations, or alternatively, “E” and “Z” orientations.

[0463] The term “alkynyl” denotes linear or branched radicals having at least one carbon-carbon triple bond and having two to about sixty carbon atoms. Examples of such radicals include propargyl, and butynyl, and the like.

[0464] Alkyl, alkylenyl, alkenyl, and alkynyl radicals may be optionally substituted with one or more functional groups such as halo, hydroxy, nitro, amino, cyano, haloalkyl, aryl, heteroaryl, and heterocyclo and the like.

[0465] The term “halo” means halogens such as fluorine, chlorine, bromine or iodine atoms.

[0466] The term “haloalkyl” embraces radicals wherein any one or more of the alkyl carbon atoms is substituted with halo as defined above. Specifically embraced are monohaloalkyl, dihaloalkyl and polyhaloalkyl radicals including perhaloalkyl. A monohaloalkyl radical, for example, may have either an iodo, bromo, chloro or fluoro atom within the radical. Dihalo and polyhaloalkyl radicals may have two or more of the same halo atoms or a combination of different halo radicals. Even more preferred are lower haloalkyl radicals having one to three carbon atoms. Examples of haloalkyl radicals include fluoromethyl, difluoromethyl, trifluoromethyl, chloromethyl, dichloromethyl, trichloromethyl, pentafluoroethyl, heptafluoropropyl, difluorochloromethyl, dichlorofluoromethyl, difluoroethyl, difluoropropyl, dichloroethyl and dichloropropyl.

[0467] The term “hydroxyalkyl” embraces linear or branched alkyl radicals having one to about ten carbon atoms any one of which may be substituted with one or more hydroxyl radicals. Examples of such radicals include hydroxymethyl, hydroxyethyl, hydroxypropyl, hydroxybutyl and hydroxyhexyl.

[0468] The term “alkoxy” embraces linear or branched oxy-containing radicals each having alkyl portions of one to about twenty carbon atoms. Examples of such radicals include methoxy, ethoxy, propoxy, butoxy and tert-butoxy. Even more preferred are lower alkoxy radicals having one to twelve carbon atoms. Alkoxy radicals may be further substituted with one or more halo atoms, such as fluoro, chloro or bromo, to provide “haloalkoxy” radicals. Examples of such radicals include fluoromethoxy, chloromethoxy, trifluoromethoxy, trifluoroethoxy, fluoroethoxy and fluoropropoxy.

[0469] The term “aryl”, alone or in combination, means a carbocyclic aromatic system containing one or two rings, wherein such rings may be attached together in a fused manner. The term “aryl” embraces aromatic radicals such as phenyl, naphthyl, indenyl, tetrahydronaphthyl, and indanyl. More preferred aryl is phenyl. An “aryl” group may have 1 or more substituents such as alkyl, hydroxyl, halo, haloalkyl, nitro, cyano, alkoxy, and alkylamino, and the like. The term “arylene” embraces bridging divalent aryl radicals, such as benzylene, phenylene, and the like.

[0470] The term “heterocyclyl” (or “heterocyclo”) embraces saturated, partially saturated and unsaturated heteroatom-containing ring radicals, where the heteroatoms may be selected from nitrogen, sulfur and oxygen. The “heterocyclyl” group may have 1 to 4 substituents such as hydroxyl, Boc, halo, haloalkyl, cyano, lower alkyl, lower aralkyl, oxo, lower alkoxy, amino and lower alkylamino.

[0471] Examples of saturated heterocyclic radicals include saturated 3 to 6-membered heteromonocyclic groups containing 1 to 4 nitrogen atoms [e.g., pyrrolidinyl, imidazolidinyl, piperidinyl, pyrrolinyl, piperazinyl]; saturated 3 to 6-membered heteromonocyclic group containing 1 to 2 oxygen atoms and 1 to 3 nitrogen atoms [e.g., morpholinyl]; saturated 3 to 6-membered heteromonocyclic group containing 1 to 2 sulfur atoms and 1 to 3 nitrogen atoms [e.g., thiazolidinyl]. Examples of partially saturated heterocyclyl radicals include dihydrothienyl, dihydropyranyl, dihydrofuryl and dihydrothiazolyl.

[0472] Examples of unsaturated heterocyclic radicals, also termed “heteroaryl” radicals, include unsaturated 5 to 6 membered heteromonocyclyl group containing 1 to 4 nitrogen atoms, for example, pyrrolyl, imidazolyl, pyrazolyl, 2-pyridyl, 3-pyridyl, 4-pyridyl, pyrimidyl, pyrazinyl, pyridazinyl, triazolyl [e.g., 4H-1,2,4-triazolyl, 1H-1,2,3-triazolyl, 2H-1,2,3-triazolyl]; unsaturated 5- to 6-membered heteromonocyclic group containing an oxygen atom, for example, pyranyl, 2-furyl, 3-furyl, etc.; unsaturated 5 to 6-membered heteromonocyclic group containing a sulfur atom, for example, 2-thienyl, 3-thienyl, etc.; unsaturated 5- to 6-membered heteromonocyclic group containing 1 to 2 oxygen atoms and 1 to 3 nitrogen atoms, for example, oxazolyl, isoxazolyl, oxadiazolyl [e.g., 1,2,4-oxadiazolyl, 1,3,4-oxadiazolyl, 1,2,5-oxadiazolyl]; unsaturated 5 to 6-membered heteromonocyclic group containing 1 to 2 sulfur atoms and 1 to 3 nitrogen atoms, for example, thiazolyl, thiadiazolyl [e.g., 1,2,4-thiadiazolyl, 1,3,4-thiadiazolyl, 1,2,5-thiadiazolyl].

[0473] The term heterocyclyl, (or heterocyclo) also embraces radicals where heterocyclic radicals are fused/condensed with aryl radicals: unsaturated condensed heterocyclic group containing 1 to 5 nitrogen atoms, for example, indolyl, isoindolyl, indolizinyl, benzimidazolyl, quinolyl, isoquinolyl, indazolyl, benzotriazolyl, tetrazolopyridazinyl [e.g., tetrazolo [1,5-b]pyridazinyl]; unsaturated condensed heterocyclic group containing 1 to 2 oxygen atoms and 1 to 3 nitrogen atoms [e.g. benzoxazolyl, benzoxadiazolyl]; unsaturated condensed heterocyclic group containing 1 to 2 sulfur atoms and 1 to 3 nitrogen atoms [e.g., benzothiazolyl, benzothiadiazolyl]; and saturated, partially unsaturated and unsaturated condensed heterocyclic group containing 1 to 2 oxygen or sulfur atoms [e.g. benzofuryl, benzothienyl, 2,3-dihydro-benzo[1,4]dioxinyl and dihydrobenzofuryl]. Preferred heterocyclic radicals include five to ten membered fused or unfused radicals. More preferred examples of heteroaryl radicals include quinolyl, isoquinolyl, imidazolyl, pyridyl, thienyl, thiazolyl, oxazolyl, furyl and pyrazinyl. Other preferred heteroaryl radicals are 5- or 6-membered heteroaryl, containing one or two heteroatoms selected from sulfur, nitrogen and oxygen, selected from thienyl, furyl, pyrrolyl, indazolyl, pyrazolyl, oxazolyl, triazolyl, imidazolyl, pyrazolyl, isoxazolyl, isothiazolyl, pyridyl, piperidinyl and pyrazinyl.

[0474] Particular examples of non-nitrogen containing heteroaryl include pyranyl, 2-furyl, 3-furyl, 2-thienyl, 3-thienyl, benzofuryl, and benzothienyl, and the like.

[0475] Particular examples of partially saturated and saturated heterocyclyl include pyrrolidinyl, imidazolidinyl, piperidinyl, pyrrolinyl, pyrazolidinyl, piperazinyl, morpholinyl, tetrahydropyranyl, thiazolidinyl, dihydrothienyl, 2,3-dihydro-benzo[1,4]dioxanyl, indolinyl, isoindolinyl, dihydrobenzothienyl, dihydrobenzofuryl, isochromanyl, chromanyl, 1,2-dihydroquinolyl, 1,2,3,4-tetrahydro-isoquinolyl, 1,2,3,4-tetrahydro-quinolyl, 2,3,4,4a,9,9a-hexahydro-1H-3-aza-fluorenyl, 5,6,7-trihydro-1,2,4-triazolo[3,4-a]isoquinolyl, 3,4-dihydro-2H-benzo[1,4]oxazinyl, benzo[1,4]dioxanyl, 2,3-dihydro-1H-1A′-benzo[d]isothiazol-6-yl, dihydropyranyl, dihydrofuryl and dihydrothiazolyl, and the like.

[0476] The term “heterocyclo” thus encompasses the following ring systems:

[chemical structure]

[chemical structure]

[chemical structure]

and the like.

[0477] The term “carbonyl,” whether used alone or with other terms, such as “aminocarbonyl,” denotes —(C═O)—.

[0478] The terms “heterocyclylalkylenyl” and “heterocyclylalkyl” embrace heterocyclic-substituted alkyl radicals. More preferred heterocyclylalkyl radicals are “5- or 6-membered heteroarylalkyl” radicals having alkyl portions of one to six carbon atoms and a 5- or 6-membered heteroaryl radical. Even more preferred are lower heteroarylalkylenyl radicals having alkyl portions of one to three carbon atoms. Examples include such radicals as pyridylmethyl and thienylmethyl.

[0479] The term “cycloalkyl” includes saturated carbocyclic groups. Preferred cycloalkyl groups include C₃-C₆ rings. More preferred compounds include, cyclopentyl, cyclopropyl, and cyclohexyl.

[0480] The term “cycloalkenyl” includes carbocyclic groups having one or more carbon-carbon double bonds including “cycloalkyldienyl” compounds. Preferred cycloalkenyl groups include C₃-C₆ rings. More preferred compounds include, for example, cyclopentenyl, cyclopentadienyl, cyclohexenyl and cycloheptadienyl.

[0481] The term “lipid” encompasses, without limitation, a biomolecule that is insoluble in water but soluble in organic solvents, being derived from natural sources, and/or being synthetically produced, and nonnatural analogs and derivatives of such a biomolecule. Examples of lipids include, without limitation, compounds otherwise described as “lipid-like” or “lipidoid”, and the compounds of Formulae I-XVI. Other examples of lipids include, without limitation, synthetic molecules that comprise natural lipids, their derivatives, and their analogs, even if said synthetic molecules are themselves water-soluble. Other examples of lipids include, without limitation, molecules comprising one or more C₅-C₂₀ alkyl groups, sterols, fatty acids, and their analogues and derivatives.

[0482] By “molecule” is meant a molecular entity (molecule, ion, complex, etc.).

[0483] By “RNA molecule” is meant a molecule that comprises RNA.

[0484] By “synthetic RNA molecule” is meant an RNA molecule that is produced outside of a cell or that is produced inside of a cell using bioengineering, by way of non-limiting example, an RNA molecule that is produced in an in vitro-transcription reaction, an RNA molecule that is produced by direct chemical synthesis or an RNA molecule that is produced in a genetically-engineered E. coli cell.

[0485] By “transfection” is meant contacting a cell with a molecule, wherein the molecule is internalized by the cell.

[0486] By “upon transfection” is meant during or after transfection.

[0487] By “medium” is meant a solvent or a solution comprising a solvent and a solute, by way of non-limiting example, Dulbecco's Modified Eagle's Medium (DMEM), DMEM+10% fetal bovine serum (FBS), saline or water.

[0488] By “complexation medium” is meant a medium to which a transfection reagent and a molecule to be transfected are added and in which the transfection reagent associates with the molecule to be transfected.

[0489] By “transfection medium” is meant a medium that can be used for transfection, by way of non-limiting example, Dulbecco's Modified Eagle's Medium (DMEM), DMEM/F12, saline or water.

[0490] By “recombinant protein” is meant a protein or peptide that is not produced in animals or humans. Non-limiting examples include human transferrin that is produced in bacteria, human fibronectin that is produced in an in vitro culture of mouse cells, and human serum albumin that is produced in a rice plant.

[0491] By “Oct4 protein” is meant a protein that is encoded by the POU5F1 gene, or a natural or engineered variant, family-member, orthologue, fragment or fusion construct thereof, by way of non-limiting example, human Oct4 protein (SEQ ID NO: 8), mouse Oct4 protein, Oct1 protein, a protein encoded by POU5F1 pseudogene 2, a DNA-binding domain of Oct4 protein or an Oct4-GFP fusion protein. In embodiments the Oct4 protein comprises an amino acid sequence that has at least 70% identity with SEQ ID NO: 8, or in other embodiments, at least 75%, 80%, 85%, 90%, or 95% identity with SEQ ID NO: 8. In embodiments, the Oct4 protein comprises an amino acid sequence having from 1 to 20 amino acid insertions, deletions, or substitutions (collectively) with respect to SEQ ID NO: 8. Or in other embodiments, the Oct4 protein comprises an amino acid sequence having from 1 to 15 or from 1 to 10 amino acid insertions, deletions, or substitutions (collectively) with respect to SEQ ID NO: 8.

[0492] By “Sox2 protein” is meant a protein that is encoded by the Sox2 gene, or a natural or engineered variant, family-member, orthologue, fragment or fusion construct thereof, by way of non-limiting example, human Sox2 protein (SEQ ID NO: 9), mouse Sox2 protein, a DNA-binding domain of Sox2 protein or a Sox2-GFP fusion protein. In embodiments the Sox2 protein comprises an amino acid sequence that has at least 70% identity with SEQ ID NO: 9, or in other embodiments, at least 75%, 80%, 85%, 90%, or 95% identity with SEQ ID NO: 9. In embodiments, the Sox2 protein comprises an amino acid sequence having from 1 to 20 amino acid insertions, deletions, or substitutions (collectively) with respect to SEQ ID NO: 9. Or in other embodiments, the Sox2 protein comprises an amino acid sequence having from 1 to 15 or from 1 to 10 amino acid insertions, deletions, or substitutions (collectively) with respect to SEQ ID NO: 9.

[0493] By “Klf4 protein” is meant a protein that is encoded by the KLF4 gene, or a natural or engineered variant, family-member, orthologue, fragment or fusion construct thereof, by way of non-limiting example, human Klf4 protein (SEQ ID NO: 10), mouse Klf4 protein, a DNA-binding domain of Klf4 protein or a Klf4-GFP fusion protein. In embodiments the Klf4 protein comprises an amino acid sequence that has at least 70% identity with SEQ ID NO: 10, or in other embodiments, at least 75%, 80%, 85%, 90%, or 95% identity with SEQ ID NO: 10. In embodiments, the Klf4 protein comprises an amino acid sequence having from 1 to 20 amino acid insertions, deletions, or substitutions (collectively) with respect to SEQ ID NO: 10. Or in other embodiments, the Klf4 protein comprises an amino acid sequence having from 1 to 15 or from 1 to 10 amino acid insertions, deletions, or substitutions (collectively) with respect to SEQ ID NO: 10.

[0494] By “c-Myc protein” is meant a protein that is encoded by the MYC gene, or a natural or engineered variant, family-member, orthologue, fragment or fusion construct thereof, by way of non-limiting example, human c-Myc protein (SEQ ID NO: 11), mouse c-Myc protein, I-Myc protein, c-Myc (T58A) protein, a DNA-binding domain of c-Myc protein or a c-Myc-GFP fusion protein. In embodiments the c-Myc protein comprises an amino acid sequence that has at least 70% identity with SEQ ID NO: 11, or in other embodiments, at least 75%, 80%, 85%, 90%, or 95% identity with SEQ ID NO: 11. In embodiments, the c-Myc protein comprises an amino acid having from 1 to 20 amino acid insertions, deletions, or substitutions (collectively) with respect to SEQ ID NO: 11. Or in other embodiments, the c-Myc protein comprises an amino acid sequence having from 1 to 15 or from 1 to 10 amino acid insertions, deletions, or substitutions (collectively) with respect to SEQ ID NO: 11.

[0495] By “reprogramming” is meant causing a change in the phenotype of a cell, by way of non-limiting example, causing a β-cell progenitor to differentiate into a mature β-cell, causing a fibroblast to dedifferentiate into a pluripotent stem cell, causing a keratinocyte to transdifferentiate into a cardiac stem cell, causing the telomeres of a cell to lengthen or causing the axon of a neuron to grow.

[0496] By “reprogramming factor” is meant a molecule that, when a cell is contacted with the molecule and/or the cell expresses the molecule, can, either alone or in combination with other molecules, cause reprogramming, by way of non-limiting example, Oct4 protein, Tert protein, or erythropoietin.

[0497] By “germ cell” is meant a sperm cell or an egg cell.

[0498] By “pluripotent stem cell” is meant a cell that can differentiate into cells of all three germ layers (endoderm, mesoderm, and ectoderm) in vivo.

[0499] By “somatic cell” is meant a cell that is not a pluripotent stem cell or a germ cell, by way of non-limiting example, a skin cell.

[0500] By “hematopoietic cell” is meant a blood cell or a cell that can differentiate into a blood cell, by way of non-limiting example, a hematopoietic stem cell, or a white blood cell.

[0501] By “cardiac cell” is meant a heart cell or a cell that can differentiate into a heart cell, by way of non-limiting example, a cardiac stem cell, or a cardiomyocyte.

[0502] By “retinal cell” is meant a cell of the retina or a cell that can differentiate into a cell of the retina, by way of non-limiting example, a retinal pigmented epithelial cell.

[0503] By “skin cell” is meant a cell that is normally found in the skin, by way of non-limiting example, a fibroblast, a keratinocyte, a melanocyte, an adipocyte, a mesenchymal stem cell, an adipose stem cell or a blood cell.

[0504] By “immunosuppressant” is meant a substance that can suppress one or more aspects of an immune system, and that is not normally present in a mammal, by way of non-limiting example, B18R or dexamethasone.

[0505] By “single-strand break” is meant a region of single-stranded or double-stranded DNA in which one or more of the covalent bonds linking the nucleotides has been broken in one of the one or two strands.

[0506] By “double-strand break” is meant a region of double-stranded DNA in which one or more of the covalent bonds linking the nucleotides has been broken in each of the two strands.

[0507] By “nucleotide” is meant a nucleotide or a fragment or derivative thereof, by way of non-limiting example, a nucleobase, a nucleoside, a nucleotide-triphosphate, etc.

[0508] By “nucleoside” is meant a nucleotide or a fragment or derivative thereof, by way of non-limiting example, a nucleobase, a nucleoside, a nucleotide-triphosphate, etc.

[0509] By “gene editing” is meant altering the DNA sequence of a cell, by way of non-limiting example, by transfecting the cell with a protein that causes a mutation in the DNA of the cell or by transfecting the cell with a protein that causes a chemical change in the DNA of the cell.

[0510] By “gene-editing protein” is meant a protein that can, either alone or in combination with one or more other molecules, alter the DNA sequence of a cell, by way of non-limiting example, a nuclease, a transcription activator-like effector nuclease (TALEN), a zinc-finger nuclease, a meganuclease, a nickase, a gene-editing protein disclosed in WO2014/071219A1, the entirety of which is incorporated herein by reference, a clustered regularly interspaced short palindromic repeat (CRISPR)-associated protein, a DNA-repair protein, a DNA-modification protein, a base-modification protein, a DNA methyltransferase, an protein that causes DNA demethylation, an enzyme for which DNA is a substrate or a natural or engineered variant, family-member, orthologue, domain, fragment or fusion construct thereof.

[0511] By “repair template” is meant a nucleic acid containing a region of at least about 70% homology with a sequence that is within 10 kb of a target site of a gene-editing protein.

[0512] By “repeat sequence” is meant an amino-acid sequence that is present in more than one copy in a protein, to within at least about 10% homology, by way of non-limiting example, a monomer repeat of a transcription activator-like effector.

[0513] By “DNA-binding domain” is meant a region of a molecule that is capable of binding to a DNA molecule, by way of non-limiting example, a protein domain comprising one or more zinc fingers, a protein domain comprising one or more transcription activator-like (TAL) effector repeat sequences or a binding pocket of a small molecule that is capable of binding to a DNA molecule.

[0514] By “binding site” is meant a nucleic-acid sequence that is capable of being recognized by a gene-editing protein, DNA-binding protein, DNA-binding domain or a biologically active fragment or variant thereof or a nucleic-acid sequence for which a gene-editing protein, DNA-binding protein, DNA-binding domain or a biologically active fragment or variant thereof has high affinity, by way of non-limiting example, an about 20-base-pair sequence of DNA in exon 1 of the human BIRC5 gene.

[0515] By “target” is meant a nucleic acid that contains a binding site.

[0516] By “liposome” is meant an entity containing amphiphilic molecules, hydrophobic molecules, or a mixture thereof, that is at least transiently stable in an aqueous environment, by way of non-limiting example, a micelle, a unilamellar bilayer with aqueous interior, a multilamellar bilayer, a lipid nanoparticle, any of the foregoing complexed with one or more nucleic acids, or a stable nucleic acid lipid particle.

[0517] By “PEGylated” is meant covalently or otherwise stably bound to a poly(ethylene glycol) chain of any length or any molecular weight.

[0518] LIPOFECTIN is a 1:1 (w/w) mixture of N-[1-(2,3-dioleyloxy)propyl]-N,N,N-trimethylammonium chloride (DOTMA) and dioleoylphosphatidylethanolamine (DOPE).

[0519] LIPOFECTAMINE is a 3:1 (w/w) mixture of the polycationic lipid, 2,3-dioleyloxy-N-[2(sperminecarboxamido)ethyl]-N,N-dimethyl-1-propanaminium trifluoroacetate (DOSPA), and DOPE.

[0520] LIPOFECTAMINE 2000 is a 2:3 mixture of the polycationic lipid N¹,N⁴-dimyristyl-N¹,N⁴-di-(2-hydroxy-3-aminopropyl)-diaminobutane (DHDMS), and cholesterol.

[0521] LIPOFECTAMINE 3000 is a 1:1 mixture of the polycationic lipid (DHDMS), and dioleoylphosphatidylethanolamine (DOPE).

[0522] By “DLinDHS” or “DHDLinS” is meant N¹,N⁴-dilinoleyl-N¹,N⁴-di-(2-hydroxy-3-aminopropyl)-diaminobutane. This invention is further illustrated by the following non-limiting examples.

### NUMBERED EMBODIMENTS

### Embodiment 1: A Compound of Formula (I)

[0523] [chemical structure] [0524] wherein: Q₁, Q₂, Q₃, and Q₄ are independently an atom or group capable of adopting a positive charge; A₁ and A₂ are independently null, H, or optionally substituted C₁-C₆ alkyl;
[0525] L₁, L₂, and L₃ are independently null, a bond, (C₁-C₂₀)alkanediyl, (halo)(C₁-C₂₀)alkanediyl, (hydroxy)(C₁-C₂₀)alkanediyl, (alkoxy)(C₁-C₂₀)alkanediyl, arylene, heteroarylene, cycloalkanediyl, heterocycle-diyl, or any combination of the aforementioned optionally linked by one or more of an ether, an ester, an anhydride, an amide, a carbamate, a secondary amine, a tertiary amine, a quaternary ammonium, a thioether, a urea, a carbonyl, or an imine;
[0526] R₁, R₂, R₃, R₄, R₅, R₆, R₇, and R₅ are independently null, H, (C₁-C₆₀)alkyl, (halo)(C₁-C₆₀)alkyl, (hydroxy)(C₁-C₆₀)alkyl, (alkoxy)(C₁-C₆₀)alkyl, (C₂-C₆₀)alkenyl, (halo)(C₂-C₆₀)alkenyl, (hydroxy)(C₂-C₆₀)alkenyl, (alkoxy)(C₂-C₆₀)alkenyl, (C₂-C₆₀)alkynyl, (halo)(C₂-C₆₀)alkynyl, (hydroxy)(C₂-C₆₀)alkynyl, (alkoxy)(C₂-C₆₀)alkynyl, wherein at least one of R₁, R₂, R₃, R₄, R₅, R₆, R₇, and R₅ comprises at least two unsaturated bonds; and x, y, and z are independently 0, 1, 2, 3, 4, 5, 6, 7, 8, 9, 10, 11, 12, 13, 14, or 15.

[0527] Embodiment 2: The compound of embodiment 1, wherein Q₁, Q₂, Q₃, and Q₄ independently are N, B, P, or Fe.

[0528] Embodiment 3: The compound of embodiment 2, wherein Q₁, Q₂, Q₃, and Q₄ are N.

[0529] Embodiment 4: The compound of embodiment 3, wherein Q₁, Q₂, Q₃, and Q₄ are independently a primary amine, a secondary amine, or a tertiary amine.

[0530] Embodiment 5: The compound of embodiment 4, wherein Q₁ and Q₄ are primary amines, and Q₂ and Q₃ are tertiary amines.

[0531] Embodiment 6: The compound of embodiment 1, wherein L₁, L₂, and L₃ are independently (C₁-C₆)alkanediyl or (hydroxy)(C₁-C₆)alkanediyl.

[0532] Embodiment 7: The compound of embodiment 6, wherein L₁ and L₃ are independently (hydroxy)(C₁-C₆)alkanediyl and L₂ is (C₁-C₆)alkanediyl.

[0533] Embodiment 8: The compound of embodiment 7, wherein L₁ and L₃ are 2-hydroxypropanediyl and L₂ is (C₁-C₆)alkanediyl.

[0534] Embodiment 9: The compound of embodiment 8, wherein L₁ and L₃ are 2-hydroxypropanediyl and L₂ is butanediyl.

[0535] Embodiment 10: The compound of embodiment 1, wherein one or more of R₁, R₂, R₃, R₄, R₅, R₆, R₇, and R₈ are independently selected from H, linoleyl, alpha-linolenyl, gamma-linolenyl, linoelaidyl, arachidonyl, eicosapentaenyl, and docosahexaenyl.

[0536] Embodiment 11: The compound of embodiment 1, wherein two or more of R₁, R₂, R₃, R₄, R₅, R₆, R₇, and R₈ are independently selected from H, linoleoyl, alpha-linolenoyl, gamma-linolenoyl, linoelaidoyl, arachidonoyl, eicosapentaenoyl, and docosahexaenoyl.

[0537] Embodiment 12: The compound of embodiment 1, wherein one or more of R₁, R₂, R₃, R₄, R₅, R₆, R₇, and R₈ are independently selected from H, myristoleyl, palmitoleyl, sapienyl, oleyl, elaidyl, vaccenyl, erucyl, caprylyl, capryl, lauryl, myristyl, palmityl, stearyl, arachidyl, behenyl, lignoceryl, and cerotyl.

[0538] Embodiment 13: The compound of embodiment 1, wherein two or more of R₁, R₂, R₃, R₄, R₅, R₆, R₇, and R₈ are independently selected from H, myristoleoyl, palmitoleoyl, sapienoyl, oleoyl, elaidoyl, vaccenoyl, erucoyl, capryloyl, caproyl, lauroyl, myristoyl, palmitoyl, stearoyl, arachidoyl, behenoyl, lignoceroyl, and cerotoyl.

[0539] Embodiment 14: The compound of embodiment 10, wherein R₁, R₂, R₃, R₅, R₇ and R₈ are H and R₄ and R₆ are independently selected from linoleyl, alpha-linolenyl, gamma-linolenyl, linoelaidyl, arachidonyl, eicosapentaenyl, and docosahexaenyl.

[0540] Embodiment 15: The compound of embodiment 14, wherein R₁, R₂, R₃, R₅, R₇ and R₈ are H and R₄ and R₆ are alpha-linolenyl.

[0541] Embodiment 16: The compound of embodiment 14, wherein R₁, R₂, R₃, R₅, R₇ and R₈ are H and R₄ and R₆ are linoleyl.

[0542] Embodiment 17: The compound of embodiment 1, wherein x and z are independently 0 or 1, and y is 1.

[0543] Embodiment 18: The compound of embodiment 1, wherein Q₁ and Q₄ are primary amines; Q₂ and Q₃ are tertiary amines; L₁ and L₃ are 2-hydroxypropanediyl; L₂ is butanediyl; R₁, R₂, R₃, R₅, R₇ and R₈ are H and R₄ and R₆ are linoleyl; and x, y, and z are 1.

[0544] Embodiment 19: The compound of embodiment 1, wherein one or more of L₁, L₂, and L₃ comprises at least one ester moiety.

[0545] Embodiment 20: The compound of embodiment 1, wherein one or more of R₂ and R₄ comprises at least one ester moiety.

[0546] Embodiment 21: The compound of embodiment 1, wherein A₁ and A₂ are H.

[0547] Embodiment 22: A compound of Formula (II)

[chemical structure]

[0548] wherein: R₉, R₁₀, R₁₁, R₁₂, R₁₃, R₁₄, R₁₅, R₁₆, R₁₇, R₁₈, R₁₉, R₂₀, R₂₁, R₂₂, R₂₃, R₂₄, R₂₅, R₂₆, R₂₇, and R₂₈ are independently H, halo, OH, (C₁-C₆)alkyl, (halo)(C₁-C₆)alkyl, (hydroxy)(C₁-C₆)alkyl, (alkoxy)(C₁-C₆)alkyl, aryl, heteroaryl, cycloalkyl, or heterocyclo;
[0549] i, j, k, m, s, and t are independently 0, 1, 2, 3, 4, 5, 6, 7, 8, 9, 10, 11, 12, 13, 14, or 15.

[0550] Embodiment 23: The compound of embodiment 22, wherein R₁₅, R₁₆, R₁₇, R₁₈, R₁₉, and R₂₀ are H; R₉, R₁₀, R₁₁, R₁₂, R₁₃ and R₁₄ are independently H or (C₁-C₆)alkyl; m is 8; i is 8; s is 1; j is 1; k is 4; and t is 4.

[0551] Embodiment 24: The compound of embodiment 22, wherein R₁₅, R₁₆, R₁₇, R₁₈, R₁₉, and R₂₀ are H; R₉, R₁₀, R₁₁, R₁₂, R₁₃ and R₁₄ are independently H or (C₁-C₆)alkyl; R₂₇ and R₂₈ are methyl; m is 8; i is 8; s is 1; j is 1; k is 4; and t is 4.

[0552] Embodiment 25: The compound of embodiment 22, wherein R₁₅, R₁₆, R₁₇, R₁₈, R₁₉, and R₂₀ are H; R₉, R₁₀, R₁₁, R₁₂, R₁₃ and R₁₄ are independently H; R₂₇ and R₂₈ are methyl; m is 8; i is 8; s is 1; j is 1; k is 4; and t is 4.

[0553] Embodiment 26: The compound of embodiment 22, wherein R₁₅, R₁₆, R₁₇, R₁₈, R₁₉, and R₂₀ are H; R₉, R₁₀, R₁₁, R₁₂, R₁₃ and R₁₄ are independently H; R₂₇ and R₂₈ are methyl; R₂₁, R₂₂, R₂₃, R₂₄, R₂₅, and R₂₆ are H; m is 8; i is 8; s is 1; j is 1; k is 4; and t is 4.

[0554] Embodiment 27: The compound of embodiment 22, wherein R₁₅, R₁₆, R₁₇, R₁₈, R₁₉, and R₂₀ are H; R₉, R₁₀, R₁₁, R₁₂, R₁₃ and R₁₄ are independently H; R₂₇ and R₂₈ are methyl; R₂₁, R₂₂, R₂₃, R₂₄, R₂₅, and R₂₆ are H; m is 9; i is 9; s is 1; j is 1; k is 4; and t is 4.

[0555] Embodiment 28: The compound of embodiment 22, wherein R₁₅, R₁₆, R₁₇, R₁₈, R₁₉, and R₂₀ are H; R₉, R₁₀, R₁₁, R₁₂, R₁₃ and R₁₄ are independently H; R₂₇ and R₂₈ are methyl; R₂₁, R₂₂, R₂₃, R₂₄, R₂₅, and R₂₆ are H; m is 9; i is 9; s is 1; j is 1; k is 3; and t is 3.

[0556] Embodiment 29: A compound of Formula (III):

[chemical structure]

[0557] wherein L₄, L₅, L₆, and L₇ are independently a bond, (C₁-C₂₀)alkanediyl, (halo)(C₁-C₂₀)alkanediyl, (hydroxy)(C₁-C₂₀)alkanediyl, (alkoxy)(C₁-C₂₀)alkanediyl, arylene, heteroarylene, cycloalkanediyl, heterocycle-diyl, —(CH₂)ᵥ₁—C(O)—, —((CH₂)ᵥ₁—O)ᵥ₂—, or —((CH₂)ᵥ₁—C(O)—O)ᵥ₂—;
[0558] R₂₉, R₃₀, R₃₁, R₃₂, R₃₃, R₃₄, and R₃₅ are independently H, (C₁-C₆₀)alkyl, (halo)(C₁-C₆₀)alkyl, (hydroxy)(C₁-C₆₀)alkyl, (alkoxy)(C₁-C₆₀)alkyl, (C₂-C₆₀)alkenyl, (halo)(C₂-C₆₀)alkenyl, (hydroxy)(C₂-C₆₀)alkenyl, (alkoxy)(C₂-C₆₀)alkenyl, (C₂-C₆₀)alkynyl, (halo)(C₂-C₆₀)alkynyl, (hydroxy)(C₂-C₆₀)alkynyl, (alkoxy)(C₂-C₆₀)alkynyl, wherein at least one of R₂₉, R₃₀, R₃₁, R₃₂, R₃₃, R₃₄, and R₃₅ comprises at least two unsaturated bonds;
[0559] v, v₁ and v₂ are independently 0, 1, 2, 3, 4, 5, 6, 7, 8, 9, 10, 11, 12, 13, 14, or 15.

[0560] Embodiment 30: The compound of embodiment 29, wherein L₄, L₅, L₆, and L₇ are —(CH₂)₃—; R₂₉, R₃₀, R₃₁, R₃₂, R₃₃, R₃₄, and R₃₅ are independently H or (C₂-C₆₀)alkenyl; v is 1; wherein at least two of R₂₉, R₃₀, R₃₁, R₃₂, R₃₃, R₃₄, and R₃₅ comprise at least two unsaturated bonds.

[0561] Embodiment 31: The compound of embodiment 29, wherein L₄ and L₅ are —(CH₂)₃—; L₆ and L₇ are —(CH₂)₄—; R₂₉, R₃₀, R₃₁, R₃₂, R₃₃, R₃₄, and R₃₅ are independently H or (C₂-C₆₀)alkenyl; v is 1; wherein at least two of R₂₉, R₃₀, R₃₁, R₃₂, R₃₃, R₃₄, and R₃₅ comprise at least two unsaturated bonds.

[0562] Embodiment 32: The compound of embodiment 29, wherein L₄ and L₆ are —(CH₂)₃—; L₅ and L₇ are —(CH₂)₄—; R₂₉, R₃₀, R₃₁, R₃₂, R₃₃, R₃₄, and R₃₅ are independently H or (C₂-C₆₀)alkenyl; v is 1; wherein at least two of R₂₉, R₃₀, R₃₁, R₃₂, R₃₃, R₃₄, and R₃₅ comprise at least two unsaturated bonds.

[0563] Embodiment 33: The compound of embodiment 29, wherein L₄ and L₇ are —(CH₂)₃—; L₅ and L₆ are —(CH₂)₄—; R₂₉, R₃₀, R₃₁, R₃₂, R₃₃, R₃₄, and R₃₅ are independently H or (C₂-C₆₀)alkenyl; v is 1; wherein at least two of R₂₉, R₃₀, R₃₁, R₃₂, R₃₃, R₃₄, and R₃₅ comprise at least two unsaturated bonds.

[0564] Embodiment 34: The compound of embodiment 29, wherein L₄ and L₆ are —(CH₂)₃—; L₅ and L₇ are —(CH₂)₅—; R₂₉, R₃₀, R₃₁, R₃₂, R₃₃, R₃₄, and R₃₅ are independently H or (C₂-C₆₀)alkenyl; v is 1; wherein at least two of R₂₉, R₃₀, R₃₁, R₃₂, R₃₃, R₃₄, and R₃₅ comprise at least two unsaturated bonds.

[0565] Embodiment 35: The compound of embodiment 29, wherein L₄ and L₇ are (hydroxy)(C₁-C₂₀)alkanediyl; L₅ and L₆ are —(CH₂)₃—, R₂₉, R₃₀, R₃₁, R₃₂, R₃₃, R₃₄, and R₃₅ are independently H or (C₂-C₆₀)alkenyl; v is 1; wherein at least two of R₂₉, R₃₀, R₃₁, R₃₂, R₃₃, R₃₄, and R₃₅ comprise at least two unsaturated bonds.

[0566] Embodiment 36: The compound of embodiment 29, wherein L₄ and L₇ are (hydroxy)(C₁-C₂₀)alkanediyl; L₅ and L₆ are —(CH₂)₃—; R₂₉, R₃₀, R₃₁, R₃₂, R₃₃, R₃₄, and R₃₅ are independently H or (C₂-C₆₀)alkenyl; v is 1; wherein at least three of R₂₉, R₃₀, R₃₁, R₃₂, R₃₃, R₃₄, and R₃₅ comprise at least two unsaturated bonds.

[0567] Embodiment 37: The compound of embodiment 29, wherein L₄ and L₇ are (hydroxy)(C₁-C₂₀)alkanediyl; L₅ and L₆ are —(CH₂)₄—; R₂₉, R₃₀, R₃₁, R₃₂, R₃₃, R₃₄, and R₃₅ are independently H or (C₂-C₆₀)alkenyl; v is 1; wherein at least three of R₂₉, R₃₀, R₃₁, R₃₂, R₃₃, R₃₄, and R₃₅ comprise at least two unsaturated bonds.

[0568] Embodiment 38: The compound of embodiment 29, wherein L₄ and L₇ are (hydroxy)(C₁-C₂₀)alkanediyl; L₅ and L₆ are —(CH₂)₅—; R₂₉, R₃₀, R₃₁, R₃₂, R₃₃, R₃₄, and R₃₅ are independently H or (C₂-C₆₀)alkenyl; v is 1; wherein at least three of R₂₉, R₃₀, R₃₁, R₃₂, R₃₃, R₃₄, and R₃₅ comprise at least two unsaturated bonds.

[0569] Embodiment 39: The compound of embodiment 29, wherein L₄ and L₇ are (hydroxy)(C₁-C₂₀)alkanediyl; L₅ and L₆ are —(CH₂)₆—; R₂₉, R₃₀, R₃₁, R₃₂, R₃₃, R₃₄, and R₃₅ are independently H or (C₂-C₆₀)alkenyl; v is 1; wherein at least three of R₂₉, R₃₀, R₃₁, R₃₂, R₃₃, R₃₄, and R₃₅ comprise at least two unsaturated bonds.

[0570] Embodiment 40: The compound of embodiment 29, wherein two or more of R₂₉, R₃₀, R₃₁, R₃₂, R₃₃, R₃₄, and R₃₅ are independently selected from H, myristoleoyl, palmitoleoyl, sapienoyl, oleoyl, elaidoyl, vaccenoyl, erucoyl, capryloyl, caproyl, lauroyl, myristoyl, palmitoyl, stearoyl, arachidoyl, behenoyl, lignoceroyl, and cerotoyl.

[0571] Embodiment 41: The compound of embodiment 29, wherein two or more of R₂₉, R₃₀, R₃₁, R₃₂, R₃₃, R₃₄, and R₃₅ are independently selected from H, linoleyl, alpha-linolenyl, gamma-linolenyl, linoelaidyl, arachidonyl, eicosapentaenyl, and docosahexaenyl.

[0572] Embodiment 42: The compound of embodiment 29, wherein L₄ and L₇ are 2-hydroxypropanediyl; L₂ is butanediyl; R₂₉, R₃₀, R₃₁, and R₃₂ are H, R₃₃, R₃₄, and R₃₅ are linoleyl; L₅ and L₆ are —(CH₂)₃—; and v is 1.

[0573] Embodiment 43: The compound of embodiment 29, wherein L₄ and L₇ are 2-hydroxypropanediyl; L₂ is butanediyl; R₂₉, R₃₀, R₃₁, and R₃₂ are H, R₃₃, R₃₄, and R₃₅ are linoleyl; L₅ and L₆ are —(CH₂)₄—; and v is 1.

[0574] Embodiment 44: The compound of embodiment 29, wherein L₄ and L₇ are 2-hydroxypropanediyl; L₂ is butanediyl; R₂₉, R₃₀, R₃₁, and R₃₂ are H, R₃₃, R₃₄, and R₃₅ are linoleyl; L₅ and L₆ are —(CH₂)₅—; and v is 1.

[0575] Embodiment 45: The compound of embodiment 29, wherein L₄ and L₇ are 2-hydroxypropanediyl; L₂ is butanediyl; R₂₉, R₃₀, R₃₁, and R₃₂ are H, R₃₃, R₃₄, and R₃₅ are linoleyl; L₅ and L₆ are —(CH₂)₆—; and v is 1.

[0576] Embodiment 46: A compound of Formula (IV):

[chemical structure]

[0577] wherein n is 1, 2, 3, 4, 5, 6, 7, 8, 9, 10, 11, 12, 13, 14, or 15.

[0578] Embodiment 47: A compound of Formula (V):

[chemical structure]

[0579] Embodiment 48: A compound of Formula (VI):

[chemical structure]

[0580] Embodiment 49: A compound of Formula (VII):

[chemical structure]

[0581] Embodiment 50: A compound of Formula (VIM):

[chemical structure]

[0582] Embodiment 51: A compound of Formula (IX):

[chemical structure]

[0583] Embodiment 52: A compound of Formula (X):

[chemical structure]

[0584] Embodiment 53: A compound of Formula (XI):

[chemical structure]

[0585] Embodiment 54: A compound of Formula (XII):

[chemical structure]

[0586] Embodiment 55: A compound of Formula (XIII):

[chemical structure]

[0587] Embodiment 56: A compound of Formula (XIV):

[chemical structure]

[0588] Embodiment 57: A compound of Formula (XV):

[chemical structure]

[0589] wherein n is 1, 2, 3, 4, 5, 6, 7, 8, 9, 10, 11, 12, 13, 14, or 15.

[0590] Embodiment 58: A compound of Formula (XVI):

[chemical structure]

[0591] Embodiment 59: A pharmaceutical composition comprising a compound of any one of embodiments 1-58, and a pharmaceutically acceptable carrier or excipient.

[0592] Embodiment 60: A lipid aggregate comprising the compound of any one of embodiments 1-58 or the pharmaceutical composition of embodiment 59.

[0593] Embodiment 61: The lipid aggregate of embodiment 60, wherein the lipid aggregate does not comprise one or more additional lipids or polymers.

[0594] Embodiment 62: The lipid aggregate of embodiment 60, further comprising one or more additional lipids or polymers selected from Table 1.

[0595] Embodiment 63: The lipid aggregate of embodiments 60 or 61, wherein the one or more additional lipids is a neutral lipid.

[0596] Embodiment 64: The lipid aggregate of embodiment 63, wherein the neutral lipid is dioleoylphosphatidylethanolamine (DOPE), 1,2-Dioleoyl-sn-glycero-3-phosphocholine (DOPC), or cholesterol.

[0597] Embodiment 65: The lipid aggregate of embodiment 63, wherein the neutral lipid comprises DOPE or cholesterol.

[0598] Embodiment 66: The lipid aggregate of embodiment 63, wherein the neutral lipid comprises DOPE and cholesterol.

[0599] Embodiment 67: The lipid aggregate of embodiment 63, wherein the compound comprises Formula (IV).

[0600] Embodiment 68: The lipid aggregate of any one of embodiments 60-67, wherein the one or more additional lipids is a cationic lipid.

[0601] Embodiment 69: The lipid aggregate of embodiment 68, wherein the cationic lipid is N-[1-(2,3-dioleoyloxy)propyl]-N, N, N-trimethylammonium chloride (DOTMA), 1,2-bis(oleoyloxy)-3-3-(trimethylammonia) propane (DOTAP), or 1,2-dioleoyl-3-dimethylammonium-propane (DODAP).

[0602] Embodiment 70: The lipid aggregate of any one of embodiments 60-69, further comprising DOTMA and DOPE in a ratio of about 1:1 and/or N1,N4-dioleyl-N1,N4-di-(2-hydroxy-3-aminopropyl)-diaminobutane (DHDOS) and DOPE in a ratio of about 1:1.

[0603] Embodiment 71: The lipid aggregate of embodiment 60, further comprising compound having the Formula (A):

[chemical structure]

[0604] wherein
[0605] R1 and R4 are straight-chain alkenyl having 17 carbon atoms;
[0606] R2 and R5 are —(CH2)p-NH2 where p is 1-4;
[0607] I is 1-10; and
[0608] Xa is a physiologically acceptable anion.

[0609] Embodiment 72: The compound, pharmaceutical composition, or lipid aggregate of any one of embodiments 1-71, further comprising a PEGylated lipid.

[0610] Embodiment 73: The compound, pharmaceutical composition, or lipid aggregate of any one of embodiments 1-72, wherein the Z-average particle size is from about 50 nm to about 2000 nm.

[0611] Embodiment 74: The compound, pharmaceutical composition, or lipid aggregate of any one of embodiments 1-72, wherein the Z-average particle size is from about 700 nm to about 1500 nm.

[0612] Embodiment 75: The compound, pharmaceutical composition, or lipid aggregate of any one of embodiments 1-72, wherein the Z-average particle size is about 750 nm.

[0613] Embodiment 76: The compound, pharmaceutical composition, or lipid aggregate of any one of embodiments 1-72, wherein the Z-average particle size is less than about 200 nm.

[0614] Embodiment 77: The compound, pharmaceutical composition, or lipid aggregate of any one of embodiments 1-72, wherein parameters of a medium in which the compound, pharmaceutical composition, or lipid aggregate, is formed, are used to control the Z-average particle size.

[0615] Embodiment 78: The compound, pharmaceutical composition, or lipid aggregate of any one of embodiments 1-72, wherein the ionic strength of a medium in which the compound, pharmaceutical composition, or lipid aggregate, is formed, are used to control the Z-average particle size.

[0616] Embodiment 79: The compound, pharmaceutical composition, or lipid aggregate of any one of embodiments 1-72, wherein a pH of a medium in which such compound, pharmaceutical composition, or lipid aggregate, is formed, are used to control the Z-average particle size.

[0617] Embodiment 80: The compound, pharmaceutical composition, or lipid aggregate of any one of embodiments 1-71, wherein the ionic strength of a medium in which the compound, pharmaceutical composition, or lipid aggregate, is formed, is used to maintain a particle size less than or equal to 200 nm.

[0618] Embodiment 81: The compound, pharmaceutical composition, or lipid aggregate of any one of embodiments 1-80, further comprising a stable dispersion of particles.

[0619] Embodiment 82: The compound, pharmaceutical composition, or lipid aggregate of embodiment 81, wherein the stable dispersion has a pH from about 7.0 to about 8.0, or a pH of about 7.4.

[0620] Embodiment 83: The pharmaceutical composition or lipid aggregate of any one of embodiments 1-82, further comprising insulin, transferrin, and/or albumin.

[0621] Embodiment 84: The compound, pharmaceutical composition, or lipid aggregate of any one of embodiments 1-83, further comprising a nucleic acid.

[0622] Embodiment 85: The compound, pharmaceutical composition, or lipid aggregate of embodiment 4 wherein the nucleic acid is DNA or RNA.

[0623] Embodiment 86: The compound, pharmaceutical composition, or lipid aggregate of embodiment 85, wherein RNA is synthetic RNA.

[0624] Embodiment 87: The compound, pharmaceutical composition, or lipid aggregate of embodiment 86, wherein the synthetic RNA does not comprise a non-canonical nucleotide.

[0625] Embodiment 88: The compound, pharmaceutical composition, or lipid aggregate of embodiment 86, wherein the synthetic RNA comprises a combination of non-canonical nucleotides that optionally avoid substantial cellular toxicity.

[0626] Embodiment 89: The compound, pharmaceutical composition, or lipid aggregate of embodiment 88, wherein the non-canonical nucleotides have one or more substitutions at positions selected from the 2C, 4C, and 5C positions for a pyrimidine, or selected from the 6C, 7N and 8C positions for a purine.

[0627] Embodiment 90: The compound, pharmaceutical composition, or lipid aggregate of embodiment 89, wherein the non-canonical nucleotides comprise one or more of 5-hydroxycytidine, 5-methylcytidine, 5-hydroxymethylcytidine, 5-carboxycytidine, 5-formylcytidine, 5-methoxycytidine, pseudouridine, 5-hydroxyuridine, 5-methyluridine, 5-hydroxymethyluridine, 5-carboxyuridine, 5-formyluridine, 5-methoxyuridine, 5-hydroxypseudouridine, 5-methylpseudouridine, 5-hydroxymethylpseudouridine, 5-carboxypseudouridine, 5-formylpseudouridine, and 5-methoxypseudouridine, optionally at an amount of at least 50%, or at least 60%, or at least 70%, or at least 80%, or at least 90%, or 100% of the non-canonical nucleotides.

[0628] Embodiment 91: The compound, pharmaceutical composition, or lipid aggregate of embodiment any one of embodiments 88-90, wherein at least about 50% of cytidine residues are non-canonical nucleotides, and which are selected from 5-hydroxycytidine, 5-methylcytidine, 5-hydroxymethylcytidine, 5-carboxycytidine, 5-formylcytidine, and 5-methoxycytidine.

[0629] Embodiment 92: The compound, pharmaceutical composition, or lipid aggregate of embodiment any one of embodiments 88-91, wherein at least about 75% or at least about 90% of cytidine residues are non-canonical nucleotides, and the non-canonical nucleotides are selected from 5-hydroxycytidine, 5-methylcytidine, 5-hydroxymethylcytidine, 5-carboxycytidine, 5-formylcytidine, and 5-methoxycytidine.

[0630] Embodiment 93: The compound, pharmaceutical composition, or lipid aggregate of embodiment any one of embodiments 88-92, wherein at least about 20% of uridine, or at least about 40%, or at least about 50%, or at least about 75%, or at about least 90% of uridine residues are non-canonical nucleotides, and the non-canonical are selected from pseudouridine, 5-hydroxyuridine, 5-methyluridine, 5-hydroxymethyluridine, 5-carboxyuridine, 5-formyluridine, 5-methoxyuridine, 5-hydroxypseudouridine, 5-methylpseudouridine, 5-hydroxymethylpseudouridine, 5-carboxypseudouridine, 5-formylpseudouridine, and 5-methoxypseudouridine.

[0631] Embodiment 94: The compound, pharmaceutical composition, or lipid aggregate of embodiment any one of embodiments 88-93, wherein at least about 40%, or at least about 50%, or at least about 75%, or at about least 90% of uridine residues are non-canonical nucleotides, and the non-canonical nucleotides are selected from pseudouridine, 5-hydroxyuridine, 5-methyluridine, 5-hydroxymethyluridine, 5-carboxyuridine, 5-formyluridine, 5-methoxyuridine, 5-hydroxypseudouridine, 5-methylpseudouridine, 5-hydroxymethylpseudouridine, 5-carboxypseudouridine, 5-formylpseudouridine, and 5-methoxypseudouridine.

[0632] Embodiment 95: The compound, pharmaceutical composition, or lipid aggregate of any one of embodiments 88-94, wherein at least about 10% of guanine residues are non-canonical nucleotides, and the non-canonical nucleotide is optionally 7-deazaguanosine.

[0633] Embodiment 96: The compound, pharmaceutical composition, or lipid aggregate of any one of embodiments 88-95, wherein the RNA contains no more than about 50% 7-deazaguanosine in place of guanosine residues.

[0634] Embodiment 97: The compound, pharmaceutical composition, or lipid aggregate of any one of embodiments 88-96, wherein the RNA does not contain non-canonical nucleotides in place of adenosine residues.

[0635] Embodiment 98: The compound, pharmaceutical composition, or lipid aggregate of any one of embodiments 88-97, wherein the RNA comprises a 5′ cap structure.

[0636] Embodiment 99: The compound, pharmaceutical composition, or lipid aggregate of any one of embodiments 88-98, wherein the RNA 5′-UTR comprises a Kozak consensus sequence.

[0637] Embodiment 100: The compound, pharmaceutical composition, or lipid aggregate of any one of embodiments 88-99, wherein the RNA 5′-UTR comprises a sequence that increases RNA stability in vivo, and the 5′-UTR may comprise an alpha-globin or beta-globin 5′-UTR.

[0638] Embodiment 101: The compound, pharmaceutical composition, or lipid aggregate of any one of embodiments 88-100, wherein the RNA 3′-UTR comprises a sequence that increases RNA stability in vivo, and the 3′-UTR may comprise an alpha-globin or beta-globin 3′-UTR.

[0639] Embodiment 102: The compound, pharmaceutical composition, or lipid aggregate of any one of embodiments 88-101, wherein the synthetic RNA molecule comprises a microRNA binding site, the micro-RNA binding site optionally being: a miR142 micro-RNA binding site (optionally being one of SEQ ID NO: 811 and SEQ ID NO: 812) or a variant thereof and/or present in the 3′-UTR of the synthetic RNA molecule in one or more copies.

[0640] Embodiment 103: The compound, pharmaceutical composition, or lipid aggregate of any one of embodiments 88-102, wherein the RNA comprises a 3′ poly(A) tail and optionally wherein the RNA 3′ poly(A) tail is from about 20 nucleotides to about 250 nucleotides in length.

[0641] Embodiment 104: The compound, pharmaceutical composition, or lipid aggregate of any one of embodiments 88-103, wherein the RNA is from about 200 nucleotides to about 5000 nucleotides in length.

[0642] Embodiment 105: The compound, pharmaceutical composition, or lipid aggregate of any one of embodiments 88-104, wherein the RNA is from about 500 to about 2000 nucleotides in length, or about 500 to about 1500 nucleotides in length, or about 500 to about 1000 nucleotides in length.

[0643] Embodiment 106: The compound, pharmaceutical composition, or lipid aggregate of any one of embodiments 88-105, wherein the RNA is prepared by in vitro transcription.

[0644] Embodiment 107: The compound, pharmaceutical composition, or lipid aggregate of any one of embodiments 1-106, wherein the composition is suitable for administration by subcutaneous injection, intradermal injection, subdermal injection, intramuscular injection, intravenous, intrathecal, intratumoral, and topical administration.

[0645] Embodiment 108: The compound, pharmaceutical composition, or lipid aggregate of any one of embodiments 1-107, wherein the composition is suitable for administration as one or more injections containing about 1 ng to about 2000 ng of RNA.

[0646] Embodiment 109: The compound, pharmaceutical composition, or lipid aggregate of any one of embodiments 88-108, wherein the synthetic RNA is mRNA.

[0647] Embodiment 110: The compound, pharmaceutical composition, or lipid aggregate of embodiment 109, wherein the mRNA encodes a protein of interest.

[0648] Embodiment 111: The compound, pharmaceutical composition, or lipid aggregate of embodiment 110, wherein the protein of interest is a soluble protein, optionally selected from Table 2B.

[0649] Embodiment 112: The compound, pharmaceutical composition, or lipid aggregate of embodiment 111, wherein the soluble protein is one or more reprogramming factors.

[0650] Embodiment 113: The compound, pharmaceutical composition, or lipid aggregate of embodiment 112, wherein the wherein the one or more reprogramming factors is selected from Oct4, Sox2, Klf4, c-Myc, I-Myc, Tert, Nanog, Lin28, Utf1, Aicda, miR200 micro-RNA, miR302 micro-RNA, miR367 micro-RNA, miR369 micro-RNA and biologically active fragments, analogues, variants and family-members thereof.

[0651] Embodiment 114: The compound, pharmaceutical composition, or lipid aggregate of embodiment 110, wherein the protein of interest is a gene-editing protein.

[0652] Embodiment 115: The compound, pharmaceutical composition, or lipid aggregate of embodiment 114, wherein the gene-editing protein is selected from a nuclease, a transcription activator-like effector nuclease (TALEN), a zinc-finger nuclease, a meganuclease, a nickase, a clustered regularly interspaced short palindromic repeat (CRISPR)-associated protein, CRISPR/Cas9, Cas9, xCas9, Cas12a (Cpf1), Cas13a, Cas14, CasX, CasY, a Class 1 Cas protein, a Class 2 Cas protein, and MAD7, or a natural or engineered variant, family-member, orthologue, fragment or fusion construct thereof.

[0653] Embodiment 116: The compound, pharmaceutical composition, or lipid aggregate of embodiment 115, wherein the gene-editing protein comprises a DNA-binding domain comprising a plurality of repeat sequences and at least one of the repeat sequences comprises the amino acid sequence: LTPvQWAIAwxyzGHGG (SEQ ID NO: 629) and is between 36 and 39 amino acids long, wherein: “v” is Q, D or E, “w” is S or N, “x” is H, N, or I, “y” is D, A, I, N, G, H, K, S, or null, and “z” is GGKQALETVQRLLPVLCQD (SEQ ID NO: 630) or GGKQALETVQRLLPVLCQA (SEQ ID NO: 631).

[0654] Embodiment 117: The compound, pharmaceutical composition, or lipid aggregate of embodiment 116, wherein the gene-editing protein further comprises a nuclease domain comprising a catalytic domain of a nuclease.

[0655] Embodiment 118: The compound, pharmaceutical composition, or lipid aggregate of any one of embodiments 114-117, wherein the gene-editing protein is capable of creating a single-strand or double-strand break in the gene.

[0656] Embodiment 119: The compound, pharmaceutical composition, or lipid aggregate of embodiment 118, wherein the single-strand or double-strand break causes persistent altered splicing of the gene.

[0657] Embodiment 120: The compound, pharmaceutical composition, or lipid aggregate of any one of embodiments 114-119, further comprising a functional copy of the gene.

[0658] Embodiment 121: A method for transfecting a cell with a nucleic acid, comprising contacting the cell with a complex of the nucleic acid and a compound, pharmaceutical composition, or lipid aggregate of any of the above embodiments.

[0659] Embodiment 122: The method of embodiment 121, wherein the complex is formed prior to contact with the cell.

[0660] Embodiment 123: The method of embodiments 121 or 122, wherein the method provides one of the following characteristics: (a) high transfection efficiency, (b) high level of endosomal escape, (c) serum-resistance, low toxicity effects, (d) high level of protein expression, (e) transfectability in various cell types, and (f) transfectability without additional lipids or reagents for transfection.

[0661] Embodiment 124: The method of any one of embodiments 121-123, wherein the characteristics are relative to a method of transfecting a cell with complex of the nucleic acid and DOTMA, DOTMA, DODAP, and DOPE, and cholesterol, and combinations thereof.

[0662] Embodiment 125: The method of any one of embodiments 121-124, wherein the characteristics are relative to a method of transfecting a cell with complex of the nucleic acid and LIPOFECTIN, LIPOFECTAMINE, LIPOFECTAMINE 2000, LIPOFECTAMINE 3000.

[0663] Embodiment 126: A method for reprogramming a differentiated or a non-pluripotent cell to a less differentiated state, comprising: (a) providing a differentiated or a non-pluripotent cell; (b) culturing the differentiated or a non-pluripotent cell; (c) transfecting the differentiated or a non-pluripotent cell with a complex of one or more synthetic RNA molecules and a compound, pharmaceutical composition, or lipid aggregate of any of the above embodiments, wherein the one or more synthetic RNA molecules include at least one RNA molecule encoding one or more reprogramming factors and wherein the transfecting results in the cell expressing the one or more reprogramming factors, to result in the cell being reprogrammed to a less differentiated state.

[0664] Embodiment 127: The method of embodiment 126, where step (c) occurs in the presence of a medium containing ingredients that support reprogramming of the differentiated or a non-pluripotent to a less differentiated state.

[0665] Embodiment 128: The method of embodiment 126 or 127, further comprising repeating step (c) at least twice during 5 consecutive days.

[0666] Embodiment 129: The method of embodiment 128, wherein the amount of one or more synthetic RNA molecules transfected in one or more later transfections is greater than the amount transfected in one or more earlier transfections.

[0667] Embodiment 130: The method of any one of embodiments 126-129, wherein steps (a)-(c) are performed without using feeder cells and occur in the presence of a feeder cell conditioned medium.

[0668] Embodiment 131: The method of any one of embodiments 126-130, wherein step (c) is performed without using irradiated human neonatal fibroblast feeder cells and occurs in the presence of a feeder cell conditioned medium.

[0669] Embodiment 132: The method of any one of embodiments 126-131, wherein the synthetic RNA molecule encodes one or more reprogramming factor(s) selected from Oct4, Sox2, Klf4, c-Myc, 1-Myc, Tert, Nanog, Lin28, Utf1, Aicda, miR200 micro-RNA, miR302 micro-RNA, miR367 micro-RNA, miR369 micro-RNA and biologically active fragments, analogues, variants and family-members thereof.

[0670] Embodiment 133: The method of embodiment 126, wherein the differentiated or a non-pluripotent cell is derived from a biopsy.

[0671] Embodiment 134: The method of embodiment 126, wherein the differentiated or a non-pluripotent cell is from a human subject.

[0672] Embodiment 135: The method of embodiment 126, wherein the differentiated or a non-pluripotent cell is derived from a dermal punch biopsy sample.

[0673] Embodiment 136: The method of embodiment 126, wherein the differentiated or a non-pluripotent cell is a skin cell.

[0674] Embodiment 137: The method of embodiment 126, further comprising contacting the cell with at least one member of the group: poly-L-lysine, poly-L-ornithine, RGD peptide, fibronectin, vitronectin, collagen, and laminin.

[0675] Embodiment 138: The method of embodiment 126, wherein the synthetic RNA molecule contains at least one non-canonical nucleotide.

[0676] Embodiment 139: The method of embodiment 126, wherein the synthetic RNA molecule lacks any non-canonical nucleotides.

[0677] Embodiment 140: The method of embodiment 126, wherein the medium is substantially free of immunosuppressants.

[0678] Embodiment 141: A method for gene-editing a cell, comprising transfecting the cell with a complex of one or more synthetic RNA molecules and a compound, pharmaceutical composition, or lipid aggregate of any of the above embodiments, wherein the one or more synthetic RNA molecules include at least one RNA molecule encoding one or more gene-editing protein is selected from a nuclease, a transcription activator-like effector nuclease (TALEN), a zinc-finger nuclease, a meganuclease, a nickase, a clustered regularly interspaced short palindromic repeat (CRISPR)-associated protein, CRISPR/Cas9, Cas9, xCas9, Cas12a (Cpf1), Cas13a, Cas14, CasX, CasY, a Class 1 Cas protein, a Class 2 Cas protein, and MAD7, or a natural or engineered variant, family-member, orthologue, fragment or fusion construct thereof.

[0679] Embodiment 142: The method of embodiment 141, wherein the gene-editing protein comprises a DNA-binding domain comprising a plurality of repeat sequences and at least one of the repeat sequences comprises the amino acid sequence: LTPvQWAIAwxyzGHGG (SEQ ID NO: 629), wherein: “v” is Q, D or E, “w” is S or N, “x” is H, N, or I, “y” is D, A, I, N, G, H, K, S, or null, and “z” is GGKQALETVQRLLPVLCQD (SEQ ID NO: 630) or GGKQALETVQRLLPVLCQA (SEQ ID NO: 631).

[0680] Embodiment 143: The method of embodiment 141 or 142, wherein the gene-editing protein is between 36 and 39 amino acids long.

[0681] Embodiment 144: The method of any one of embodiments 141-143, wherein the gene-editing protein comprises a nuclease domain comprising a catalytic domain of a nuclease.

[0682] Embodiment 145: The method of any one of embodiments 141-144, wherein the nuclease is selected from StsI and FokI.

[0683] Embodiment 146: A method for extracting an organic compound from a reaction containing lithium aluminum hydride and a solvent comprising: (a) quenching the reaction with water; (b) removing the solvent; (c) removing excess water; and (d) extracting the organic compound with an alcohol; to yield an extracted organic compound.

[0684] Embodiment 147: The method of embodiment 146, whererin the alcohol is isopropyl alcohol.

[0685] Embodiment 148: A method for extracting an organic compound from a reaction containing a water-reactive compound and a first solvent comprising: (a) quenching the reaction with water; (b) removing the first solvent; (c) removing excess water; and (d) extracting the organic compound with a second solvent; to yield an extracted organic compound.

[0686] Embodiment 149: A method for purifying an organic compound from a mixture of the organic compound and a phthalimide or phthalimide derivative comprising: (a) dissolving the mixture in acetone to form a precipitate; (b) removing the precipitate by centrifugation; and (c) removing the acetone; to yield a purified organic compound.

[0687] Embodiment 150: The method of embodiment 149, wherein the phthalimide or phthalimide derivative is phthalhydrazine.

### EXAMPLES

### Example 1: Synthesis of Linoleoyl Chloride (1)

[chemical structure]

[0689] Oxalyl chloride (47.0 mL, 555 mmol) was added to a solution of linoleic acid (70.0 g, 250 mmol) in 580 mL anhydrous methylene chloride at 0° C. under N2 atmosphere. The reaction was warmed to room temperature and stirred vigorously for 24 hours. Solvent and oxalyl chloride were removed under reduced pressure to yield linoleoyl chloride as a brown oil, which was used without further purification.

### Example 2: Synthesis of Adinolenoyl Chloride (2)

[chemical structure]

[0691] Oxalyl chloride (3.36 mL, 50.4 mmol) was added to α-linolenic acid (5.00 g, 18.0 mmol) in 35 mL anhydrous methylene chloride according to the protocol of Example 1. After 24 hours, solvent and oxalyl chloride were removed to yield 4.1 g of α-linolenoyl chloride as a yellow-brown oil.

### Example 3: Synthesis of N¹,N⁴-dilinoleoyl-diaminobutane (3)

[0692] A solution of 1,4-diaminobutane (0.428 g, 4.86 mmol) and triethylamine (2.03 mL, 14.6 mmol) in 1 mL of anhydrous methylene chloride was slowly added to a solution of linoleoyl chloride (2.98 g, 10.0 mmol) in 30 mL of anhydrous methylene chloride in an ice bath at 0° C. The reaction mixture was stirred vigorously with a magnetic stir bar. After addition was complete, the ice bath was removed and the mixture was stirred at room temperature for 2.5 days. The reaction was cooled to 4° C., and a white solid precipitated from the solution. The excess linoleoyl chloride was removed by vacuum filtration. The precipitate was washed twice with 10 mL of methylene chloride. The mother liquor was concentrated and more product precipitated. This precipitate was filtered and combined with the previous precipitate. The resulting solid was vacuum dried for 4 hours. A total of 1.9 g of a white solid of the desired product, N¹,N⁴-dilinoleoyl-diaminobutane, was obtained.

### Example 4: Synthesis of N¹,N⁴-dilinoleyl-diaminobutane (4)

[0693] Lithium aluminum hydride (0.6 g, 95%, 16 mmol) was carefully added to a suspension of N¹,N⁴-dilinoleoyl-diaminobutane (1.8 g, 2.9 mmol) in 50 mL anhydrous diethyl ether at 0° C. After addition was complete, the ice bath was removed. The reaction mixture was warmed slowly to room temperature and then heated gently to reflux with an appropriate condensing device and stirred for 12 hours. The reaction mixture was cooled and quenched carefully at 0° C. with 5 mL of water. The diethyl ether was removed under reduced pressure, and the reaction mixture was dried under vacuum. The dried reaction mixture was extracted three times with 25 mL of isopropyl alcohol at 80° C. The isopropyl alcohol was removed to yield 1.6 g of oily colorless N¹,N⁴-dilinoleyl-diaminobutane.

### Example 5: Synthesis of N¹,N⁴-dilinoleyl-N¹,N⁴-di-[2-hydroxy-3-(N-phthalamido)propyl]-diaminobutane (5)

[0694] Diisopropylethylamine (1.15 mL, 12.0 mmol) was added to a suspension of N¹,N⁴-dilinoleyl-diaminobutane (1.6 g, 2.7 mmol) and N-(2,3-epoxypropyl)-phthalimide (1.6 g, 7.9 mmol) in 12 mL of dry N,N-dimethylformamide. After purging with nitrogen, the reaction mixture was sealed in a round-bottom flask and heated to around 90° C. for 24 hours. N,N-dimethylformamide and diisopropylethylamine were removed and a yellow oil was obtained. Synthesis was continued without additional purification.

### Example 6: Synthesis of N¹,N⁴-dilinoleyl-N¹,N⁴-di-(2-hydroxy-3-aminopropyl)-diaminobutane (6)

[0695] The entire crude oil of N¹,N⁴-dilinoleyl-N¹,N⁴-di-[2-hydroxy-3-(N-phthalamido)propyl]-diaminobutane was dissolved in 25 mL of anhydrous ethanol. Hydrazine (0.5 mL, 64-65% aq., 10.3 mmol) was added at room temperature. With an appropriate condensing device, the reaction mixture was heated to reflux. The oil bath was set to 85° C. After 15 minutes, a white solid precipitated from the solution. The reaction mixture was stirred at reflux for 4 hours before being cooled to −20° C. The white solid was removed by gravity filtration. The residue was washed twice with cold ethanol. The combined ethanol solution was concentrated and dried overnight under vacuum. The crude product was extracted with acetone. The combined acetone solution was concentrated and dried overnight under vacuum. 1.0 g of an oil, N¹,N⁴-dilinoleyl-N¹,N⁴-di-(2-hydroxy-3-aminopropyl)-diaminobutane (hereinafter referred to as DHDLinS or DLinDHS), was obtained. A process of a synthesis of DLinDHS is shown schematically in FIG. 12.

### Example 7 Synthesis of Lipids

[0696] The following compounds are synthesized by the methods of Examples 1 through 6 using the corresponding amine and acyl chloride:
[0697] N¹,N⁴-dilinolenoyl-N¹,N⁴-di-(2-hydroxy-3-aminopropyl)-diaminobutane (7);
[0698] N¹,N²-dilinoleyl-N¹,N²-di-(2-hydroxy-3-aminopropyl)-diaminoethane (8);
[0699] N¹,N³-dilinoleyl-N¹,N³-di-(2-hydroxy-3-aminopropyl)-diaminopropane (9);
[0700] N¹,N⁵-dilinoleyl-N¹,N⁵-di-(2-hydroxy-3-aminopropyl)-diaminopentane (10);
[0701] N¹,N⁶-dilinoleyl-N¹,N⁶-di-(2-hydroxy-3-aminopropyl)-diaminohexane (11);
[0702] Linoleyl-bis(N-linoleyl-N-(2-hydroxy-3-aminopropyl)-2-aminoethyl)amine (12);
[0703] N¹,N³-dilinoleyl-N¹—(N-linoleyl-N-[2-hydroxy-3-aminopropyl]-2-aminoethyl)-N³-[2-hydroxy-3-aminopropyl]-1,3-diaminopropane (13);
[0704] Linoleyl-bis(N-linoleyl-N-(2-hydroxy-3-aminopropyl)-2-aminopropyl)amine (14);
[0705] N¹,N⁴-dilinoleyl-N¹—(N-linoleyl-N-[2-hydroxy-3-aminopropyl]-3-aminopropyl)-N⁴-[2-hydroxy-3-aminopropyl]-1,4-diaminobutane (15);
[0706] N¹,N⁴-bis(N-linoleyl-N-[2-hydroxy-3-aminopropyl]-aminopropyl)-1,4-diaminobutane (16).

### Example 8: Transfection with Inventive Lipids

[0707] Stock solutions of lipid in ethanol were prepared at 20 mg/mL and at 5 mg/mL and stored at −20° C. To perform transfections, nucleic acid was first diluted in DMEM (1 μg of nucleic acid in 50 μL of DMEM), then the desired amount of lipid stock solution was added. After adding the lipid, the solution was mixed thoroughly, and complexes were allowed to form for between about 5 minutes and 25 minutes before adding to cells. For the experiments depicted in FIG. 1 through FIG. 6, the lipid was used without the acetone purification described in Example 6.

[0708] FIG. 1 depicts transfection of primary human epidermal keratinocytes with in vitro transcribed RNA encoding green fluorescent protein (GFP) complexed with the various lipids. As shown in the figure, cells were transfected with high efficiency by DHDLinS.

[0709] FIG. 2 depicts a time course of the experiment of FIG. 1, i.e. florescence measured at the indicated time points following transfection using DHDLinS. A fluorescent signal was detected one hour following transfection, and both the signal intensity and number of fluorescent cells increased for several hours following transfection.

[0710] FIG. 3 depicts transfection with various indicated amounts of RNA (in nanograms) and lipid-to-RNA mass ratios (in micrograms of lipid per microgram of RNA). As shown in the figure, all RNA amounts and lipid-to-RNA mass ratios tested yielded a fluorescent signal. In general, larger amounts of RNA yielded a stronger signal and/or larger number of fluorescent cells, while minimal increase in fluorescence signal was observed at lipid-to-RNA mass ratios greater than 5 μg/μg.

[0711] FIG. 4 depicts a transfection experiment with human peripheral blood mononuclear cells (hPBMCs) instead of keratinocytes. As shown in the figure, DHDLinS effectively transfected hPBMCs at both lipid-to-RNA mass ratios tested, while no transfection was observed with LIPOFECTAMINE 3000, (“LF3000”) a commercial transfection reagent.

[0712] FIG. 5A extends the transfection findings to a confluent layer of primary human epidermal keratinocytes instead of hPBMCs. As shown in the figure, DHDLinS effectively transfected confluent primary human epidermal keratinocytes at both lipid-to-RNA mass ratios tested, while the cells treated with LIPOFECTAMINE 3000 were not efficiently transfected. FIG. 5B depicts this at higher magnification. As shown in the figure, DHDLinS effectively transfected confluent primary human epidermal keratinocytes at both lipid-to-RNA mass ratios tested, while the cells treated with LIPOFECTAMINE 3000 were not efficiently transfected.

[0713] FIG. 6 depicts the results of an experiment conducted as in FIG. 4, but with primary human adult dermal fibroblasts instead of hPBMCs. As shown in the figure, DHDLinS effectively transfected primary human adult dermal fibroblasts at both lipid-to-RNA mass ratios tested, while the cells treated with LIPOFECTAMINE 3000 were not efficiently transfected. FIG. 7 depicts this experiment at higher magnification. As shown in the figure, DHDLinS effectively transfected primary human adult dermal fibroblasts at both lipid-to-RNA mass ratios tested, while the cells treated with LIPOFECTAMINE 3000 were not efficiently transfected.

[0714] FIG. 8 depicts the results of an experiment conducted as in FIG. 3, but with DHDLinS purified by extraction with acetone as described in Example 6. As shown in the figure, minimal increase in fluorescence signal was observed at lipid-to-RNA mass ratios greater than 2 μg/μg.

[0715] FIG. 9 depicts the results of an experiment in which primary human epidermal keratinocytes were transfected with in vitro transcribed RNA encoding gene-editing proteins complexed with DHDLinS. Gene-editing efficiency was measured by hybridizing an amplicon containing the target sequence and generated from genomic DNA of transfected cells with an identically prepared amplicon generated from untreated cells, followed by digestion with T7E1 endonuclease. As shown in the figure, cells were gene edited at high efficiency. The numbers above each lane indicate the number of cells transfected, and the amount of RNA transfected.

[0716] FIG. 10 depicts the results of an experiment in which primary human epidermal keratinocytes were transfected with in vitro transcribed RNA encoding GFP complexed with DLinDHS at a lipid-to-RNA mass ratios of 2.5 μg/μg as described in Example 8. The mRNA-DLinDHS complexes were added to 20,000 human epidermal keratinocytes in serum-free medium (0% FBS) or 50% FBS. Images were taken 16 hours following transfection. The results of the measured florescence are shown in the right panel, which illustrate that DLinDHS efficiently delivers mRNA in 50% serum. The left panel illustrates, for comparison, that serum inhibits mRNA delivery using LNPs. In particular, GFP-encoding mRNA was formulated into LNPs composed of DLin-MC3-DMA, DOPE, cholesterol, DMPE-PEG (molar ratio 30:30:38.5:1.5). The mRNA-LNPs (300 ng final mRNA) were added to 20,000 human epidermal keratinocytes in serum-free medium (0% FBS) or 50% FBS. Images were taken 16 hours following transfection.

[0717] FIG. 11A illustrates the results of an experiment in which primary human dermal fibroblasts were transfected with in vitro transcribed RNA encoding GFP and complexed with DLinDHS at a lipid-to-RNA mass ratios of 2.5 μg/μg as described in Example 8. 100 ng of GFP-encoding mRNA, 20% of which was labeled with Cy5, was added to 20,000 human dermal fibroblasts in 10% FBS. Fluorescence images were taken at 10-minute intervals for 10 hours following transfection, with Cy5-labeled RNA and GFP resolved in separate channels. The images in FIG. 11A show that mRNA was detected in cytoplasm within 50 minutes of contact with DLinDHS lipoplexes, and that protein expression begins within 2.5 hours after transfection.

[0718] FIG. 11B illustrates the results of an experiment in which primary human dermal fibroblasts were transfected with in vitro transcribed RNA encoding GFP and complexed with labeled DLinDHS. DLinDHS was conjugated with BODIPY-NHS ester fluorophore (Molecular Probes, Eugene, Oreg.) at a 10:1 molar ratio of DLinDHS to fluorophore, and complexed with RNA as described in Example 8. 200 ng of GFP-encoding mRNA was added to cells. Fluorescence images were taken at 20-minute intervals for 4 hours following transfection, including immediately after administration of complexes (“0 min”), with BODIPY-labeled DLinDHS and GFP resolved in separate channels. The images in FIG. 11B show that DLinDHS contacts cells within minutes after transfection, and that most cells are contacted by multiple lipoplexes.

### Example 9: Investigation of the Effect of Headgroup Size and Degree of Unsaturation in the Fatty-Acid Tail of DLinDHS

[0719] A study was conducted to, in part, assess the effect of a size of the dihydroxyspermine (DHS) headgroup of DLinDHS, and a degree of unsaturation in the fatty-acid tail of DLinDHS.

[0720] FIG. 13 illustrates the results of an experiment in which primary human epidermal keratinocytes were transfected with in vitro transcribed RNA encoding GFP and complexed with compounds of the invention, comprising a dihydroxyspermine headgroup conjugated to different fatty-acid derived tails, including myristyl, oleyl, linoleyl, and linolenyl. In this experiment, 100 ng GFP-encoding RNA, complexed with the above lipids and with LIPOFECTAMINE 2000 (as a control), was added to 20,000 keratinocytes in 50% FBS. The results are shown in the graph of FIG. 13, as fluorescence (a.u.) versus the time after transfection (hours).

[0721] FIG. 14 illustrates the results of an experiment in which primary human epidermal keratinocytes were transfected with in vitro transcribed RNA encoding GFP and complexed with compounds of the invention, comprising a dilinoleyl fatty-acid derived tail structure. The tested compounds' structure is a bis-(2-hydroxy-3-aminopropyl)-N,N′-dilinoleyl-diamine, as shown in the figure, with the labels indicating the length of the central inter-amino carbon chain of the headgroup (C2, C4, C5, C6, C8, C10, and C12). LIPOFECTAMINE 2000 was used as a control. In this experiment, 100 ng GFP-encoding mRNA, complexed with lipids of the invention or with LIPOFECTAMINE 2000, was added to 20,000 keratinocytes in 50% FBS. The results are illustrated in the graph of FIG. 14, showing fluorescence (a.u.) versus the time after transfection (hours).

### Example 10: Investigation of the Ability of DLinDHS/mRNA Lipoplexes to Exhibit Ionic Strength-Dependent Particle Size and pH-dependent Zeta Potential

[0722] FIG. 15 illustrates that the particle size of DLinDHS lipoplex is ionic-strength dependent. DLinDHS/RNA complexes were formed by dilution of lipid from ethanol stock into aqueous mRNA solution with varied concentration of sodium chloride. The particle size was measured by dynamic light scattering (DLS). The graph in FIG. 15 illustrates Z-average particle size (nm) and polydispersity index (PDI) of DLinDHS/RNA complexes, formed in nine different complexation media.

[0723] FIG. 16 illustrates that DLinDHS lipoplexes have pH-dependent zeta potential. In vitro transcribed RNA encoding GFP was complexed with DLinDHS at a lipid-to-RNA mass ratio of 2.5 μg/μg as described in Example 8, then diluted into a 20 mM citrate, pH 3.0-6.0, or 20 mM phosphate, pH 7.4). The graph depicts zeta potential (mV) as a function of dilution buffer pH. In this study, −22.1 mV zeta potential at pH 7.4 implies stable dispersion.

### Example 11: Investigation of Ability of DLinDHS to Protect mRNA from RNase A Degradation

[0724] This study was conducted to assess whether DLinDHS protects mRNA from RNase A degradation. Primary human epidermal keratinocytes were transfected with in vitro transcribed RNA encoding GFP and complexed with DLinDHS at a lipid-to-RNA mass ratio of 2.5 μg/μg as described in Example 8. For the experiment, the GFP-encoding mRNA was incubated with RNase A either before or after complexation with DLinDHS. Complexes were added to 20,000 keratinocytes in serum-free medium. FIG. 17 depicts fluorescence microscopy images of cells transfected with DLinDHS/RNA complexes without treatment with RNase A (“No treatment”), DLinDHS/RNA complexes treated with RNase A after complexation (“RNase after complexation”), and DLinDHS complexed with RNA treated with RNase A prior to complexation (“RNase before complexation”). As shown, for the DLinDHS/mRNA complexes treated with RNase after complexation, the RNA was protected from degradation such that the GFP expression was similar to GFP expression of the DLinDHS/mRNA complex not treated with RNase.

### Example 12: Investigation of mRNA Delivery to Various Types of Cells

[0725] This study was conducted to assess the efficiency of delivery of mRNA complexed with DLinDHS in various cell types using a reporter protein. Primary human dermal fibroblasts, activated human peripheral blood monocytes (PBMCs), human lung adenocarcinoma cells, induced pluripotent stem cells (iPS cells), and rat embryonic cortical neurons were transfected with in vitro transcribed RNA encoding GFP and complexed with DLinDHS at a lipid-to-RNA mass ratio of 2.5 μg/μg as described in Example 8. FIG. 18 depicts (the top panels, “GFP”) the results of the five types of cells transfected with in vitro transcribed GFP-encoding RNA that is complexed with DLinDHS lipoplex. The bottom panels (“Neg.”) of FIG. 18 depict negative control experiments wherein no RNA was delivered.

### Example 13: Investigation of mRNA Delivery to Multiple Tissues in Rat

[0726] A study was conducted to, in part, assess the uptake of mRNA complexed with the lipids of the present invention following delivery by multiple routes in rat. In vitro transcribed RNA encoding GFP and complexed with DLinDHS at a lipid-to-RNA mass ratio of 2.5 μg/μg as described in Example 8 is administered to rats according to the study parameters:

Test System

| | | | | | No. of Spares |
|---|---|---|---|---|---|
| Species | Strain | Number | Gender | Wt. Range | (purchased) |
| Rat | Sprague Dawley | 22 | Either | 170-200 g | 0 |

Study Design Table

| | No. of | Description of | No. of Treatments | Interim | Necropsy |
|---|---|---|---|---|---|
| Group | Animals | Treatment | per animal | Procedures | Time point |
| 1 | 2 | Intradermal injection (mRNA) | 1 | None | 48 hours |
| 2 | 2 | Liver infusion (mRNA) | 1 | None | 48 hours |
| 3 | 2 | Neostriatal injection (mRNA) | 1 | None | 48 hours |
| 4 | 2 | Lateral ventricle injection | 1 | None | 48 hours |
| | | (mRNA) | | | |
| 5 | 2 | Unilateral Intravitreal injection | 1 | None | 48 hours |
| | | (mRNA) | | | |
| 6 | 4 | Unilateral Subretinal injection | 1 | None | 48 hours |
| | | (mRNA) | | | |
| 7 | 2 | Unilateral Topical ophthalmic | 1 | None | 48 hours |
| | | application (mRNA) | | | |
| 8 | 2 | Tail vein injection (Saline) | 1 | None | 48 hours |
| 9 | 2 | Tail vein injection (mRNA-A) | 1 | None | 48 hours |
| 10 | 2 | Tail vein injection (mRNA-B) | 1 | None | 48 hours |

Histology Processing

| | | Total No. of | No. of Slides | | |
|---|---|---|---|---|---|
| Tissue | Embedding | Blocks | per Block | Stain | Total Slides |
| Skin (Group 1) | Paraffin | 2 | 5 | None | 10 |
| Liver (Group 2, 8-10) | Paraffin | 8 | 5 | None | 40 |
| Brain (Groups 3-4, 8-10) | Paraffin | 10 | 15 | None | 150 |
| Eye (injected) (Groups 5-7) | Paraffin | 8 | 20 | None | 160 |
| Heart (Groups 8-10) | Paraffin | 6 | 5 | None | 30 |
| Lungs (Groups 8-10) | Paraffin | 12 | 5 | None | 60 |
| Kidneys (Groups 8-10) | Paraffin | 12 | 5 | None | 60 |
| Spleen (Groups 8-10) | Paraffin | 6 | 5 | None | 30 |

| | |
|---|---|
| Total Slides | 540 |

Notes:
Eyes (injected eye only) will be embedded with paraffin and microtome sectioned.
Blocks will be faced off and 2 consecutive slides collected (2-5 micron sections per slide).
The blocks will be advanced in 0.5 mm increments 10x, producing 20 slides per block.
Sections to be mounted on slides and delivered to sponsor for staining.
Brain sections will include 5 slides each from forebrain, mid-hrain, and hind-brain/cerebellum.

[0727] Collected slides were stained with hematoxylin and with a rabbit anti-GFP antibody to determine the localization and extent of reporter protein expression in the collected tissues of interest.

[0728] FIG. 19 shows (left panel) the image of the rat tissue at 80 μm scale, and (right panel) the image of the rat tissue at 20 μm scale. As shown in FIG. 19, intradermal injection of DLinDHS complexed with mRNA encoding the reporter protein (GFP) yielded localized expression in the dermal layer.

### Example 14: Investigation of In Vivo mRNA Delivery to a Human Subject by Intradermal Injection

[0729] This study was conducted to assess the uptake of mRNA complexed with the lipids of the present invention following intradermal injection to a human subject. In vitro transcribed RNA encoding red fluorescent protein (RFP) complexed with DLinDHS at a lipid-to-RNA mass ratio of 2.5 μg/μg as described in Example 8 was administered to a ventral forearm of a human male via intradermal injection (400 ng of RNA in a total volume of 20 μL). After 48 hours, skin from the injection site was biopsied and imaged by confocal fluorescence microscopy. FIG. 20A shows (top panel) images of skin into which DLinDHS/mRNA complexes were injected and (bottom panel) a negative control. FIG. 20B shows magnified images on which the arrows indicate RFP-positive cells that have a morphology consistent with that of fibroblasts.

### EQUIVALENTS

[0730] Those skilled in the art will recognize, or be able to ascertain, using no more than routine experimentation, numerous equivalents to the specific embodiments described specifically herein. Such equivalents are intended to be encompassed in the scope of the following claims.

### INCORPORATION BY REFERENCE

[0731] All patents and publications referenced herein are hereby incorporated by reference in their entireties.

What is claimed is:

1. A compound of Formula (IV) [chemical structure]
wherein n is 1, 2, 3, 4, 5, 6, 7, 8, 9, 10, 11, 12, 13, 14, or 15.

2. The compound of claim 1, wherein n is 2-15.

3. The compound of claim 1, wherein n is 2-12.

4. The compound of claim 1, wherein the compound is:

[chemical structure]

5. The compound of claim 1, wherein the compound is:

[chemical structure]

6. The compound of claim 1, wherein the compound is:

[chemical structure]

7. The compound of claim 1, wherein the compound is:

[chemical structure]

8. The compound of claim 1, wherein the compound is:

[chemical structure]

9. The compound of claim 1, wherein the compound is:

[chemical structure]

10. The compound of claim 1, wherein the compound is:

[chemical structure]

11. The compound of claim 1, wherein the compound is:

[chemical structure]

12. A pharmaceutical composition comprising a compound of claim 1, and a pharmaceutically acceptable carrier or excipient.

13. A lipid aggregate comprising the compound of claim 1.

14. The lipid aggregate of claim 13, wherein the lipid aggregate does not comprise one or more additional lipids or polymers.

15. The lipid aggregate of claim 13, further comprising a nucleic acid, selected from a DNA or RNA molecule.

16. A method for transfecting a cell with a nucleic acid, comprising contacting the cell with a complex of the nucleic acid and a compound of Formula (IV): [chemical structure]
wherein n is 1, 2, 3, 4, 5, 6, 7, 8, 9, 10, 11, 12, 13, 14, or 15.

17. The method of claim 16, wherein the compound is selected from: [chemical structure]

The application's sequence listing, which the Patent Office published only in electronic form, follows.

SEQUENCE LISTING (859 sequences)

SEQ ID NO: 1 - protein, 195 aa, Homo sapiens
VLEKSDIEKFKNQLRTELTNIDHSYLKGIDIASKKKTSNVENTEFEAISTKIFTDELGFSGKHLGGSNKPDGLLWDDDCAIILDSKAYSEGFPLTASHTDAMGRYLRQFTERKEEIKPTWWDIAPEHLDNTYFAYVSGSFSGNYKEQLQKFRQDTNHLGGALEFVKLLLLANNYKTQKMSKKEVKKSILDYNISY

SEQ ID NO: 2 - protein, 195 aa, Homo sapiens
VLEKSDIEKFKNQLRTELTNIDHSYLKGIDIASKKKTSNVENTEFEAISTKIFTDELGFSGEHLGGSNKPDGLLWDDDCAIILDSKAYSEGFPLTASHTDAMGRYLRQFTERKEEIKPTWWDIAPEHLDNTYFAYVSGSFSGNYKEQLQKFRQDTNHLGGALEFVKLLLLANNYKTQKMSKKEVKKSILDYNISY

SEQ ID NO: 3 - protein, 195 aa, Homo sapiens
VLEKSDIEKFKNQLRTELTNIDHSYLKGIDIASKPKTSNVENTEFEAISTKIFTDELGFSGKHLGGSNKPDGLLWDDDCAIILDSKAYSEGFPLTASHTDAMGRYLRQFTERKEEIKPTWWDIAPEHLDNTYFAYVSGSFSGNYKEQLQKFRQDTNHLGGALEFVKLLLLANNYKTQKMSKKEVKKSILDYNISY

SEQ ID NO: 4 - protein, 195 aa, Homo sapiens
VLEKSDIEKFKNQLRTELTNIDHSYLKGIDIASKPKTSNVENTEFEAISTKIFTDELGFSGEHLGGSNKPDGLLWDDDCAIILDSKAYSEGFPLTASHTDAMGRYLRQFTERKEEIKPTWWDIAPEHLDNTYFAYVSGSFSGNYKEQLQKFRQDTNHLGGALEFVKLLLLANNYKTQKMSKKEVKKSILDYNISY

SEQ ID NO: 5 - protein, 191 aa, Homo sapiens
VLEKSDIEKFKNQLRTELTNIDHSYLKGIDIASKPVENTEFEAISTKIFTDELGFSGEHLGGSNKPDGLLWDDDCAIILDSKAYSEGFPLTASHTDAMGRYLRQFTERKEEIKPTWWDIAPEHLDNTYFAYVSGSFSGNYKEQLQKFRQDTNHLGGALEFVKLLLLANNYKTQKMSKKEVKKSILDYNISY

SEQ ID NO: 6 - protein, 195 aa, Homo sapiens
VLEKSDIEKFKNQLRTELTNIDHSYLKGIDIASKKKTSNVENTEFEAISTKIFTDELGFSGKHLGGSNKPDGLLWDDDCAIILDSKAYSEGFPLTASHTDAMGRYLRQFTERKEEIKPTWWDIAPEHLDNTYFAYVSGSFSGDYKEQLQKFRQDTNHLGGALEFVKLLLLANNYKTQKMSKKEVKKSILDYNISY

SEQ ID NO: 7 - protein, 195 aa, Homo sapiens
VLEKSDIEKFKNQLRTELTNIDHSYLKGIDIASKKKTSNVENTEFEAISTKIFTDELGFSGKHLGGSNKPDGLLWDDDCAIILDSKAYSEGFPLTASHTDAMGRYLRQFTERKEEIKPTWWDIAPEHLDNTYFAYVSGSFSGDYKEQLQKFRQNTNHLGGALEFVKLLLLANNYKTQKMSKKEVKKSILDYNISY

SEQ ID NO: 8 - protein, 360 aa, Homo sapiens
MAGHLASDFAFSPPPGGGGDGPGGPEPGWVDPRTWLSFQGPPGGPGIGPGVGPGSEVWGIPPCPPPYEFCGGMAYCGPQVGVGLVPQGGLETSQPEGEAGVGVESNSDGASPEPCTVTPGAVKLEKEKLEQNPEESQDIKALQKELEQFAKLLKQKRITLGYTQADVGLTLGVLFGKVFSQTTICRFEALQLSFKNMCKLRPLLQKWVEEADNNENLQEICKAETLVQARKRKRTSIENRVRGNLENLFLQCPKPTLQQISHIAQQLGLEKDVVRVWFCNRRQKGKRSSSDYAQREDFEAAGSPFSGGPVSFPLAPGPHFGTPGYGSPHFTALYSSVPFPEGEAFPPVSVTTLGSPMHSN

SEQ ID NO: 9 - protein, 317 aa, Homo sapiens
MYNMMETELKPPGPQQTSGGGGGNSTAAAAGGNQKNSPDRVKRPMNAFMVWSRGQRRKMAQENPKMHNSEISKRLGAEWKLLSETEKRPFIDEAKRLRALHMKEHPDYKYRPRRKTKTLMKKDKYTLPGGLLAPGGNSMASGVGVGAGLGAGVNQRMDSYAHMNGWSNGSYSMMQDQLGYPQHPGLNAHGAAQMQPMHRYDVSALQYNSMTSSQTYMNGSPTYSMSYSQQGTPGMALGSMGSVVKSEASSSPPVVTSSSHSRAPCQAGDLRDMISMYLPGAEVPEPAAPSRLHMSQHYQSGPVPGTAINGTLPLSHM

SEQ ID NO: 10 - protein, 479 aa, Homo sapiens
MRQPPGESDMAVSDALLPSFSTFASGPAGREKTLRQAGAPNNRWREELSHMKRLPPVLPGRPYDLAAATVATDLESGGAGAACGGSNLAPLPRRETEEFNDLLDLDFILSNSLTHPPESVAATVSSSASASSSSSPSSSGPASAPSTCSFTYPIRAGNDPGVAPGGTGGGLLYGRESAPPPTAPFNLADINDVSPSGGFVAELLRPELDPVYIPPQQPQPPGGGLMGKFVLKASLSAPGSEYGSPSVISVSKGSPDGSHPVVVAPYNGGPPRTCPKIKQEAVSSCTHLGAGPPLSNGHRPAAHDFPLGRQLPSRTTPTLGLEEVLSSRDCHPALPLPPGFHPHPGPNYPSFLPDQMQPQVPPLHYQELMPPGSCMPEEPKPKRGRRSWPRKRTATHTCDYAGCGKTYTKSSHLKAHLRTHTGEKPYHCDWDGCGWKFARSDELTRHYRKHTGHRPFQCQKCDRAFSRSDHLALHMKRHF

SEQ ID NO: 11 - protein, 454 aa, Homo sapiens
MDFFRVVENQQPPATMPLNVSFTNRNYDLDYDSVQPYFYCDEEENFYQQQQQSELQPPAPSEDIWKKFELLPTPPLSPSRRSGLCSPSYVAVTPFSLRGDNDGGGGSFSTADQLEMVTELLGGDMVNQSFICDPDDETFIKNIIIQDCMWSGFSAAAKLVSEKLASYQAARKDSGSPNPARGHSVCSTSSLYLQDLSAAASECIDPSVVFPYPLNDSSSPKSCASQDSSAFSPSSDSLLSSTESSPQGSPEPLVLHEETPPTTSSDSEEEQEDEEEIDVVSVEKRQAPGKRSESGSPSAGGHSKPPHSPLVLKRCHVSTHQHNYAAPPSTRKDYPAAKRVKLDSVRVLRQISNNRKCTSPRSSDTEENVKRRTHNVLERQRRNELKRSFFALRDQIPELENNEKAPKVVILKKATAYILSVQAEEQKLISEEDLLRKRREQLKHKLEQLRNSCA

SEQ ID NO: 12-52 - skipped (41 entries)

SEQ ID NO: 53 - protein, 196 aa, Homo sapiens
QLVKSELEEKKSELRHKLKYVPHEYIELIEIARNSTQDRILEMKVMEFFMKVYGYRGKHLGGSRKPDGAIYTVGSPIDYGVIVDTKAYSGGYNLPIGQADEMQRYVEENQTRNKHINPNEWWKVYPSSVTEFKFLFVSGHFKGNYKAQLTRLNHITNCNGAVLSVEELLIGGEMIKAGTLTLEEVRRKFNNGEINF

SEQ ID NO: 54 - protein, 36 aa, Homo sapiens
  MOD_RES (12)..(13): Any naturally occurring amino acid
LTPEQVVAIASXXGGKQALETVQRLLPVLCQAHGGG

SEQ ID NO: 55 - protein, 36 aa, Homo sapiens
  MOD_RES (12)..(13): Any naturally occurring amino acid
LTPEQVVAIASXXGGKQALETVQRLLPVLCQAGHGG

SEQ ID NO: 56 - protein, 36 aa, Homo sapiens
  MOD_RES (12)..(13): Any naturally occurring amino acid
LTPEQVVAIASXXGGKQALETVQRLLPVLCQAHGSG

SEQ ID NO: 57 - protein, 1089 aa, Homo sapiens
  MOD_RES (188)..(189): Any naturally occurring amino acid
  MOD_RES (224)..(225): Any naturally occurring amino acid
  MOD_RES (258)..(259): Any naturally occurring amino acid
  MOD_RES (294)..(295): Any naturally occurring amino acid
  MOD_RES (328)..(329): Any naturally occurring amino acid
  MOD_RES (364)..(365): Any naturally occurring amino acid
  MOD_RES (398)..(399): Any naturally occurring amino acid
  MOD_RES (434)..(435): Any naturally occurring amino acid
  MOD_RES (468)..(469): Any naturally occurring amino acid
  MOD_RES (504)..(505): Any naturally occurring amino acid
  MOD_RES (538)..(539): Any naturally occurring amino acid
  MOD_RES (574)..(575): Any naturally occurring amino acid
  MOD_RES (608)..(609): Any naturally occurring amino acid
  MOD_RES (644)..(645): Any naturally occurring amino acid
  MOD_RES (678)..(679): Any naturally occurring amino acid
  MOD_RES (714)..(715): Any naturally occurring amino acid
  MOD_RES (748)..(749): Any naturally occurring amino acid
  MOD_RES (784)..(785): Any naturally occurring amino acid
  MOD_RES (818)..(819): Any naturally occurring amino acid
MDYKDHDGDYKDHDIDYKDDDDKMAPKKKRKVGIHGVPAAVDLRTLGYSQQQQEKIKPKVRSTVAQHHEALVGHGFTHAHIVALSQHPAALGTVAVKYQDMIAALPEATHEAIVGVGKQWSGARALEALLTVAGELRGPPLQLDTGQLLKIAKRGGVTAVEAVHAWRNALTGAPLNLTPEQVVAIASXXGGKQALETVQRLLPVLCQAGHGGLTPEQVVAIASXXGGKQALETVQRLLPVLCQAHGLTPEQVVAIASXXGGKQALETVQRLLPVLCQAGHGGLTPEQVVAIASXXGGKQALETVQRLLPVLCQAHGLTPEQVVAIASXXGGKQALETVQRLLPVLCQAGHGGLTPEQVVAIASXXGGKQALETVQRLLPVLCQAHGLTPEQVVAIASXXGGKQALETVQRLLPVLCQAGHGGLTPEQVVAIASXXGGKQALETVQRLLPVLCQAHGLTPEQVVAIASXXGGKQALETVQRLLPVLCQAGHGGLTPEQVVAIASXXGGKQALETVQRLLPVLCQAHGLTPEQVVAIASXXGGKQALETVQRLLPVLCQAGHGGLTPEQVVAIASXXGGKQALETVQRLLPVLCQAHGLTPEQVVAIASXXGGKQALETVQRLLPVLCQAGHGGLTPEQVVAIASXXGGKQALETVQRLLPVLCQAHGLTPEQVVAIASXXGGKQALETVQRLLPVLCQAGHGGLTPEQVVAIASXXGGKQALETVQRLLPVLCQAHGLTPEQVVAIASXXGGKQALETVQRLLPVLCQAGHGGLTPEQVVAIASXXGGKQALETVQRLLPVLCQAHGLTPEQVVAIASXXGGRPALESIVAQLSRPDPALAALTNDHLVALACLGGRPALDAVKKGLPHAPALIKRTNRRIPERTSHRVAGSQLVKSELEEKKSELRHKLKYVPHEYIELIEIARNSTQDRILEMKVMEFFMKVYGYRGKHLGGSRKPDGAIYTVGSPIDYGVIVDTKAYSGGYNLPIGQADEMQRYVEENQTRNKHINPNEWWKVYPSSVTEFKFLFVSGHFKGNYKAQLTRLNHITNCNGAVLSVEELLIGGEMIKAGTLTLEEVRRKFNNGEINFRS

SEQ ID NO: 58 - protein, 1107 aa, Homo sapiens
  MOD_RES (188)..(189): Any naturally occurring amino acid
  MOD_RES (224)..(225): Any naturally occurring amino acid
  MOD_RES (260)..(261): Any naturally occurring amino acid
  MOD_RES (296)..(297): Any naturally occurring amino acid
  MOD_RES (332)..(333): Any naturally occurring amino acid
  MOD_RES (368)..(369): Any naturally occurring amino acid
  MOD_RES (404)..(405): Any naturally occurring amino acid
  MOD_RES (440)..(441): Any naturally occurring amino acid
  MOD_RES (476)..(477): Any naturally occurring amino acid
  MOD_RES (512)..(513): Any naturally occurring amino acid
  MOD_RES (548)..(549): Any naturally occurring amino acid
  MOD_RES (584)..(585): Any naturally occurring amino acid
  MOD_RES (620)..(621): Any naturally occurring amino acid
  MOD_RES (656)..(657): Any naturally occurring amino acid
  MOD_RES (692)..(693): Any naturally occurring amino acid
  MOD_RES (728)..(729): Any naturally occurring amino acid
  MOD_RES (764)..(765): Any naturally occurring amino acid
  MOD_RES (800)..(801): Any naturally occurring amino acid
  MOD_RES (836)..(837): Any naturally occurring amino acid
MDYKDHDGDYKDHDIDYKDDDDKMAPKKKRKVGIHGVPAAVDLRTLGYSQQQQEKIKPKVRSTVAQHHEALVGHGFTHAHIVALSQHPAALGTVAVKYQDMIAALPEATHEAIVGVGKQWSGARALEALLTVAGELRGPPLQLDTGQLLKIAKRGGVTAVEAVHAWRNALTGAPLNLTPEQVVAIASXXGGKQALETVQRLLPVLCQAGHGGLTPEQVVAIASXXGGKQALETVQRLLPVLCQAGHGGLTPEQVVAIASXXGGKQALETVQRLLPVLCQAGHGGLTPEQVVAIASXXGGKQALETVQRLLPVLCQAGHGGLTPEQVVAIASXXGGKQALETVQRLLPVLCQAGHGGLTPEQVVAIASXXGGKQALETVQRLLPVLCQAGHGGLTPEQVVAIASXXGGKQALETVQRLLPVLCQAGHGGLTPEQVVAIASXXGGKQALETVQRLLPVLCQAGHGGLTPEQVVAIASXXGGKQALETVQRLLPVLCQAGHGGLTPEQVVAIASXXGGKQALETVQRLLPVLCQAGHGGLTPEQVVAIASXXGGKQALETVQRLLPVLCQAGHGGLTPEQVVAIASXXGGKQALETVQRLLPVLCQAGHGGLTPEQVVAIASXXGGKQALETVQRLLPVLCQAGHGGLTPEQVVAIASXXGGKQALETVQRLLPVLCQAGHGGLTPEQVVAIASXXGGKQALETVQRLLPVLCQAGHGGLTPEQVVAIASXXGGKQALETVQRLLPVLCQAGHGGLTPEQVVAIASXXGGKQALETVQRLLPVLCQAGHGGLTPEQVVAIASXXGGKQALETVQRLLPVLCQAGHGGLTPEQVVAIASXXGGRPALESIVAQLSRPDPALAALTNDHLVALACLGGRPALDAVKKGLPHAPALIKRTNRRIPERTSHRVAGSQLVKSELEEKKSELRHKLKYVPHEYIELIEIARNSTQDRILEMKVMEFFMKVYGYRGKHLGGSRKPDGAIYTVGSPIDYGVIVDTKAYSGGYNLPIGQADEMQRYVEENQTRNKHINPNEWWKVYPSSVTEFKFLFVSGHFKGNYKAQLTRLNHITNCNGAVLSVEELLIGGEMIKAGTLTLEEVRRKFNNGEINFRS

SEQ ID NO: 59 - protein, 1086 aa, Homo sapiens
  MOD_RES (188)..(189): Any naturally occurring amino acid
  MOD_RES (224)..(225): Any naturally occurring amino acid
  MOD_RES (258)..(259): Any naturally occurring amino acid
  MOD_RES (294)..(295): Any naturally occurring amino acid
  MOD_RES (328)..(329): Any naturally occurring amino acid
  MOD_RES (364)..(365): Any naturally occurring amino acid
  MOD_RES (398)..(399): Any naturally occurring amino acid
  MOD_RES (434)..(435): Any naturally occurring amino acid
  MOD_RES (468)..(469): Any naturally occurring amino acid
  MOD_RES (504)..(505): Any naturally occurring amino acid
  MOD_RES (538)..(539): Any naturally occurring amino acid
  MOD_RES (574)..(575): Any naturally occurring amino acid
  MOD_RES (608)..(609): Any naturally occurring amino acid
  MOD_RES (644)..(645): Any naturally occurring amino acid
  MOD_RES (678)..(679): Any naturally occurring amino acid
  MOD_RES (714)..(715): Any naturally occurring amino acid
  MOD_RES (748)..(749): Any naturally occurring amino acid
  MOD_RES (784)..(785): Any naturally occurring amino acid
  MOD_RES (818)..(819): Any naturally occurring amino acid
MDYKDHDGDYKDHDIDYKDDDDKMAPKKKRKVGIHGVPAAVDLRTLGYSQQQQEKIKPKVRSTVAQHHEALVGHGFTHAHIVALSQHPAALGTVAVKYQDMIAALPEATHEAIVGVGKQWSGARALEALLTVAGELRGPPLQLDTGQLLKIAKRGGVTAVEAVHAWRNALTGAPLNLTPEQVVAIASXXGGKQALETVQRLLPVLCQAGHGGLTPEQVVAIASXXGGKQALETVQRLLPVLCQAHGLTPEQVVAIASXXGGKQALETVQRLLPVLCQAGHGGLTPEQVVAIASXXGGKQALETVQRLLPVLCQAHGLTPEQVVAIASXXGGKQALETVQRLLPVLCQAGHGGLTPEQVVAIASXXGGKQALETVQRLLPVLCQAHGLTPEQVVAIASXXGGKQALETVQRLLPVLCQAGHGGLTPEQVVAIASXXGGKQALETVQRLLPVLCQAHGLTPEQVVAIASXXGGKQALETVQRLLPVLCQAGHGGLTPEQVVAIASXXGGKQALETVQRLLPVLCQAHGLTPEQVVAIASXXGGKQALETVQRLLPVLCQAGHGGLTPEQVVAIASXXGGKQALETVQRLLPVLCQAHGLTPEQVVAIASXXGGKQALETVQRLLPVLCQAGHGGLTPEQVVAIASXXGGKQALETVQRLLPVLCQAHGLTPEQVVAIASXXGGKQALETVQRLLPVLCQAGHGGLTPEQVVAIASXXGGKQALETVQRLLPVLCQAHGLTPEQVVAIASXXGGKQALETVQRLLPVLCQAGHGGLTPEQVVAIASXXGGKQALETVQRLLPVLCQAHGLTPEQVVAIASXXGGRPALESIVAQLSRPDPALAALTNDHLVALACLGGRPALDAVKKGLPHAPALIKRTNRRIPERTSHRVAGSVLEKSDIEKFKNQLRTELTNIDHSYLKGIDIASKKKTSNVENTEFEAISTKIFTDELGFSGKHLGGSNKPDGLLWDDDCAIILDSKAYSEGFPLTASHTDAMGRYLRQFTERKEEIKPTWWDIAPEHLDNTYFAYVSGSFSGNYKEQLQKFRQDTNHLGGALEFVKLLLLANNYKTQKMSKKEVKKSILDYNISY

SEQ ID NO: 60 - protein, 1104 aa, Homo sapiens
  MOD_RES (188)..(189): Any naturally occurring amino acid
  MOD_RES (224)..(225): Any naturally occurring amino acid
  MOD_RES (260)..(261): Any naturally occurring amino acid
  MOD_RES (296)..(297): Any naturally occurring amino acid
  MOD_RES (332)..(333): Any naturally occurring amino acid
  MOD_RES (368)..(369): Any naturally occurring amino acid
  MOD_RES (404)..(405): Any naturally occurring amino acid
  MOD_RES (440)..(441): Any naturally occurring amino acid
  MOD_RES (476)..(477): Any naturally occurring amino acid
  MOD_RES (512)..(513): Any naturally occurring amino acid
  MOD_RES (548)..(549): Any naturally occurring amino acid
  MOD_RES (584)..(585): Any naturally occurring amino acid
  MOD_RES (620)..(621): Any naturally occurring amino acid
  MOD_RES (656)..(657): Any naturally occurring amino acid
  MOD_RES (692)..(693): Any naturally occurring amino acid
  MOD_RES (728)..(729): Any naturally occurring amino acid
  MOD_RES (764)..(765): Any naturally occurring amino acid
  MOD_RES (800)..(801): Any naturally occurring amino acid
  MOD_RES (836)..(837): Any naturally occurring amino acid
MDYKDHDGDYKDHDIDYKDDDDKMAPKKKRKVGIHGVPAAVDLRTLGYSQQQQEKIKPKVRSTVAQHHEALVGHGFTHAHIVALSQHPAALGTVAVKYQDMIAALPEATHEAIVGVGKQWSGARALEALLTVAGELRGPPLQLDTGQLLKIAKRGGVTAVEAVHAWRNALTGAPLNLTPEQVVAIASXXGGKQALETVQRLLPVLCQAGHGGLTPEQVVAIASXXGGKQALETVQRLLPVLCQAGHGGLTPEQVVAIASXXGGKQALETVQRLLPVLCQAGHGGLTPEQVVAIASXXGGKQALETVQRLLPVLCQAGHGGLTPEQVVAIASXXGGKQALETVQRLLPVLCQAGHGGLTPEQVVAIASXXGGKQALETVQRLLPVLCQAGHGGLTPEQVVAIASXXGGKQALETVQRLLPVLCQAGHGGLTPEQVVAIASXXGGKQALETVQRLLPVLCQAGHGGLTPEQVVAIASXXGGKQALETVQRLLPVLCQAGHGGLTPEQVVAIASXXGGKQALETVQRLLPVLCQAGHGGLTPEQVVAIASXXGGKQALETVQRLLPVLCQAGHGGLTPEQVVAIASXXGGKQALETVQRLLPVLCQAGHGGLTPEQVVAIASXXGGKQALETVQRLLPVLCQAGHGGLTPEQVVAIASXXGGKQALETVQRLLPVLCQAGHGGLTPEQVVAIASXXGGKQALETVQRLLPVLCQAGHGGLTPEQVVAIASXXGGKQALETVQRLLPVLCQAGHGGLTPEQVVAIASXXGGKQALETVQRLLPVLCQAGHGGLTPEQVVAIASXXGGKQALETVQRLLPVLCQAGHGGLTPEQVVAIASXXGGRPALESIVAQLSRPDPALAALTNDHLVALACLGGRPALDAVKKGLPHAPALIKRTNRRIPERTSHRVAGSVLEKSDIEKFKNQLRTELTNIDHSYLKGIDIASKKKTSNVENTEFEAISTKIFTDELGFSGKHLGGSNKPDGLLWDDDCAIILDSKAYSEGFPLTASHTDAMGRYLRQFTERKEEIKPTWWDIAPEHLDNTYFAYVSGSFSGNYKEQLQKFRQDTNHLGGALEFVKLLLLANNYKTQKMSKKEVKKSILDYNISY

SEQ ID NO: 61-99 - skipped (39 entries)

SEQ ID NO: 100 - protein, 1273 aa, Artificial Sequence
  Synthetic Sequence
MFVFLVLLPLVSSQCVNLTTRTQLPPAYTNSFTRGVYYPDKVFRSSVLHSTQDLFLPFFSNVTWFHAIHVSGTNGTKRFDNPVLPFNDGVYFASTEKSNIIRGWIFGTTLDSKTQSLLIVNNATNVVIKVCEFQFCNDPFLGVYYHKNNKSWMESEFRVYSSANNCTFEYVSQPFLMDLEGKQGNFKNLREFVFKNIDGYFKIYSKHTPINLVRDLPQGFSALEPLVDLPIGINITRFQTLLALHRSYLTPGDSSSGWTAGAAAYYVGYLQPRTFLLKYNENGTITDAVDCALDPLSETKCTLKSFTVEKGIYQTSNFRVQPTESIVRFPNITNLCPFGEVFNATRFASVYAWNRKRISNCVADYSVLYNSASFSTFKCYGVSPTKLNDLCFTNVYADSFVIRGDEVRQIAPGQTGKIADYNYKLPDDFTGCVIAWNSNNLDSKVGGNYNYLYRLFRKSNLKPFERDISTEIYQAGSTPCNGVEGFNCYFPLQSYGFQPTNGVGYQPYRVVVLSFELLHAPATVCGPKKSTNLVKNKCVNFNFNGLTGTGVLTESNKKFLPFQQFGRDIADTTDAVRDPQTLEILDITPCSFGGVSVITPGTNTSNQVAVLYQDVNCTEVPVAIHADQLTPTWRVYSTGSNVFQTRAGCLIGAEHVNNSYECDIPIGAGICASYQTQTNSPRRARSVASQSIIAYTMSLGAENSVAYSNNSIAIPTNFTISVTTEILPVSMTKTSVDCTMYICGDSTECSNLLLQYGSFCTQLNRALTGIAVEQDKNTQEVFAQVKQIYKTPPIKDFGGFNFSQILPDPSKPSKRSFIEDLLFNKVTLADAGFIKQYGDCLGDIAARDLICAQKFNGLTVLPPLLTDEMIAQYTSALLAGTITSGWTFGAGAALQIPFAMQMAYRFNGIGVTQNVLYENQKLIANQFNSAIGKIQDSLSSTASALGKLQDVVNQNAQALNTLVKQLSSNFGAISSVLNDILSRLDKVEAEVQIDRLITGRLQSLQTYVTQQLIRAAEIRASANLAATKMSECVLGQSKRVDFCGKGYHLMSFPQSAPHGVVFLHVTYVPAQEKNFTTAPAICHDGKAHFPREGVFVSNGTHWFVTQRNFYEPQIITTDNTFVSGNCDVVIGIVNNTVYDPLQPELDSFKEELDKYFKNHTSPDVDLGDISGINASVVNIQKEIDRLNEVAKNLNESLIDLQELGKYEQYIKWPWYIWLGFIAGLIAIVMVTIMLCCMTSCCSCLKGCCSCGSCCKFDEDDSEPVLKGVKLHYT

SEQ ID NO: 101 - protein, 75 aa, Artificial Sequence
  Synthetic Sequence
MYSFVSEETGTLIVNSVLLFLAFVVFLLVTLAILTALRLCAYCCNIVNVSLVKPSFYVYSRVKNLNSSRVPDLLV

SEQ ID NO: 102 - protein, 222 aa, Artificial Sequence
  Synthetic Sequence
MADSNGTITVEELKKLLEQWNLVIGFLFLTWICLLQFAYANRNRFLYIIKLIFLWLLWPVTLACFVLAAVYRINWITGGIAIAMACLVGLMWLSYFIASFRLFARTRSMWSFNPETNILLNVPLHGTILTRPLLESELVIGAVILRGHLRIAGHHLGRCDIKDLPKEITVATSRTLSYYKLGASQRVAGDSGFAAYSRYRIGNYKLNTDHSSSSDNIALLVQ

SEQ ID NO: 103 - protein, 419 aa, Artificial Sequence
  Synthetic Sequence
MSDNGPQNQRNAPRITFGGPSDSTGSNQNGERSGARSKQRRPQGLPNNTASWFTALTQHGKEDLKFPRGQGVPINTNSSPDDQIGYYRRATRRIRGGDGKMKDLSPRWYFYYLGTGPEAGLPYGANKDGIIWVATEGALNTPKDHIGTRNPANNAAIVLQLPQGTTLPKGFYAEGSRGGSQASSRSSSRSRNSSRNSTPGSSRGTSPARMAGNGGDAALALLLLDRLNQLESKMSGKGQQQQGQTVTKKSAAEASKKPRQKRTATKAYNVTQAFGRRGPEQTQGNFGDQELIRQGTDYKHWPQIAQFAPSASAFFGMSRIGMEVTPSGTWLTYTGAIKLDDKDPNFKDQVILLNKHIDAYKTFPPTEPKKDKKKKADETQALPQRQKKQQTVTLLPAADLDDFSKQLQQSMSSADSTQA

SEQ ID NO: 104-168 - skipped (65 entries)

SEQ ID NO: 169 - protein, 986 aa, Homo sapiens
MPGVARLPLLLGLLLLPRPGRPLDLADYTYDLAEEDDSEPLNYKDPCKAAAFLGDIALDEEDLRAFQVQQAVDLRRHTARKSSIKAAVPGNTSTPSCQSTNGQPQRGACGRWRGRSRSRRAATSRPERVWPDGVIPFVIGGNFTGSQRAVFRQAMRHWEKHTCVTFLERTDEDSYIVFTYRPCGCCSYVGRRGGGPQAISIGKNCDKFGIVVHELGHVVGFWHEHTRPDRDRHVSIVRENIQPGQEYNFLKMEPQEVESLGETYDFDSIMHYARNTFSRGIFLDTIVPKYEVNGVKPPIGQRTRLSKGDIAQARKLYKCPACGETLQDSTGNFSSPEYPNGYSAHMHCVWRISVTPGEKIILNFTSLDLYRSRLCWYDYVEVRDGFWRKAPLRGRFCGSKLPEPIVSTDSRLWVEFRSSSNWVGKGFFAVYEAICGGDVKKDYGHIQSPNYPDDYRPSKVCIWRIQVSEGFHVGLTFQSFEIERHDSCAYDYLEVRDGHSESSTLIGRYCGYEKPDDIKSTSSRLWLKFVSDGSINKAGFAVNFFKEVDECSRPNRGGCEQRCLNTLGSYKCSCDPGYELAPDKRRCEAACGGFLTKLNGSITSPGWPKEYPPNKNCIWQLVAPTQYRISLQFDFFETEGNDVCKYDFVEVRSGLTADSKLHGKFCGSEKPEVITSQYNNMRVEFKSDNTVSKKGFKAHFFSDKDECSKDNGGCQQDCVNTFGSYECQCRSGFVLHDNKHDCKEAGCDHKVTSTSGTITSPNWPDKYPSKKECTWAISSTPGHRVKLTFMEMDIESQPECAYDHLEVFDGRDAKAPVLGRFCGSKKPEPVLATGSRMFLRFYSDNSVQRKGFQASHATECGGQVRADVKTKDLYSHAQFGDNNYPGGVDCEWVIVAEEGYGVELVFQTFEVEEETDCGYDYMELFDGYDSTAPRLGRYCGSGPPEEVYSAGDSVLVKFHSDDTITKKGFHLRYTSTKFQDTLHSRK

SEQ ID NO: 170 - protein, 396 aa, Homo sapiens
MVAGTRCLLALLLPQVLLGGAAGLVPELGRRKFAAASSGRPSSQPSDEVLSEFELRLLSMFGLKQRPTPSRDAVVPPYMLDLYRRHSGQPGSPAPDHRLERAASRANTVRSFHHEESLEELPETSGKTTRRFFFNLSSIPTEEFITSAELQVFREQMQDALGNNSSFHHRINIYEIIKPATANSKFPVTRLLDTRLVNQNASRWESFDVTPAVMRWTAQGHANHGFVVEVAHLEEKQGVSKRHVRISRSLHQDEHSWSQIRPLLVTFGHDGKGHPLHKREKRQAKHKQRKRLKSSCKRHPLYVDFSDVGWNDWIVAPPGYHAFYCHGECPFPLADHLNSTNHAIVQTLVNSVNSKIPKACCVPTELSAISMLYLDENEKVVLKNYQDMVVEGCGCR

SEQ ID NO: 171 - protein, 408 aa, Homo sapiens
MIPGNRMLMVVLLCQVLLGGASHASLIPETGKKKVAEIQGHAGGRRSGQSHELLRDFEATLLQMFGLRRRPQPSKSAVIPDYMRDLYRLQSGEEEEEQIHSTGLEYPERPASRANTVRSFHHEEHLENIPGTSENSAFRFLFNLSSIPENEVISSAELRLFREQVDQGPDWERGFHRINIYEVMKPPAEVVPGHLITRLLDTRLVHHNVTRWETFDVSPAVLRWTREKQPNYGLAIEVTHLHQTRTHQGQHVRISRSLPQGSGNWAQLRPLLVTFGHDGRGHALTRRRRAKRSPKHHSQRARKKNKNCRRHSLYVDFSDVGWNDWIVAPPGYQAFYCHGDCPFPLADHLNSTNHAIVQTLVNSVNSSIPKACCVPTELSAISMLYLDEYDKVVLKNYQEMVVEGCGCR

SEQ ID NO: 172 - protein, 408 aa, Homo sapiens; identical to SEQ ID NO: 171

SEQ ID NO: 173 - protein, 454 aa, Homo sapiens
MHLTVFLLKGIVGFLWSCWVLVGYAKGGLGDNHVHSSFIYRRLRNHERREIQREILSILGLPHRPRPFSPGKQASSAPLFMLDLYNAMTNEENPEESEYSVRASLAEETRGARKGYPASPNGYPRRIQLSRTTPLTTQSPPLASLHDTNFLNDADMVMSFVNLVERDKDFSHQRRHYKEFRFDLTQIPHGEAVTAAEFRIYKDRSNNRFENETIKISIYQIIKEYTNRDADLFLLDTRKAQALDVGWLVFDITVTSNHWVINPQNNLGLQLCAETGDGRSINVKSAGLVGRQGPQSKQPFMVAFFKASEVLLRSVRAANKRKNQNRNKSSSHQDSSRMSSVGDYNTSEQKQACKKHELYVSFRDLGWQDWIIAPEGYAAFYCDGECSFPLNAHMNATNHAIVQTLVHLMFPDHVPKPCCAPTKLNAISVLYFDDSSNVILKKYRNMVVRSCGCH

SEQ ID NO: 174 - protein, 513 aa, Homo sapiens
MPGLGRRAQWLCWWWGLLCSCCGPPPLRPPLPAAAAAAAGGQLLGDGGSPGRTEQPPPSPQSSSGFLYRRLKTQEKREMQKEILSVLGLPHRPRPLHGLQQPQPPALRQQEEQQQQQQLPRGEPPPGRLKSAPLFMLDLYNALSADNDEDGASEGERQQSWPHEAASSSQRRQPPPGAAHPLNRKSLLAPGSGSGGASPLTSAQDSAFLNDADMVMSFVNLVEYDKEFSPRQRHHKEFKFNLSQIPEGEVVTAAEFRIYKDCVMGSFKNQTFLISIYQVLQEHQHRDSDLFLLDTRVVWASEEGWLEFDITATSNLWVVTPQHNMGLQLSVVTRDGVHVHPRAAGLVGRDGPYDKQPFMVAFFKVSEVHVRTTRSASSRRRQQSRNRSTQSQDVARVSSASDYNSSELKTACRKHELYVSFQDLGWQDWIIAPKGYAANYCDGECSFPLNAHMNATNHAIVQTLVHLMNPEYVPKPCCAPTKLNAISVLYFDDNSNVILKKYRNMVVRACGCH

SEQ ID NO: 175 - protein, 431 aa, Homo sapiens
MHVRSLRAAAPHSFVALWAPLFLLRSALADFSLDNEVHSSFIHRRLRSQERREMQREILSILGLPHRPRPHLQGKHNSAPMFMLDLYNAMAVEEGGGPGGQGFSYPYKAVFSTQGPPLASLQDSHFLTDADMVMSFVNLVEHDKEFFHPRYHHREFRFDLSKIPEGEAVTAAEFRIYKDYIRERFDNETFRISVYQVLQEHLGRESDLFLLDSRTLWASEEGWLVFDITATSNHWVVNPRHNLGLQLSVETLDGQSINPKLAGLIGRHGPQNKQPFMVAFFKATEVHFRSIRSTGSKQRSQNRSKTPKNQEALRMANVAENSSSDQRQACKKHELYVSFRDLGWQDWIIAPEGYAAYYCEGECAFPLNSYMNATNHAIVQTLVHFINPETVPKPCCAPTQLNAISVLYFDDSSNVILKKYRNMVVRACGCH

SEQ ID NO: 176 - protein, 402 aa, Homo sapiens
MTALPGPLWLLGLALCALGGGGPGLRPPPGCPQRRLGARERRDVQREILAVLGLPGRPRPRAPPAASRLPASAPLFMLDLYHAMAGDDDEDGAPAERRLGRADLVMSFVNMVERDRALGHQEPHWKEFRFDLTQIPAGEAVTAAEFRIYKVPSIHLLNRTLHVSMFQVVQEQSNRESDLFFLDLQTLRAGDEGWLVLDVTAASDCWLLKRHKDLGLRLYVETEDGHSVDPGLAGLLGQRAPRSQQPFVVTFFRASPSPIRTPRAVRPLRRRQPKKSNELPQANRLPGIFDDVHGSHGRQVCRRHELYVSFQDLGWLDWVIAPQGYSAYYCEGECSFPLDSCMNATNHAILQSLVHLMMPDAVPKACCAPTKLSATSVLYYDSSNNVILRKHRNMVVKACGCH

SEQ ID NO: 177 - protein, 372 aa, Homo sapiens
MPPPQQGPCGHHLLLLLALLLPSLPLTRAPVPPGPAAALLQALGLRDEPQGAPRLRPVPPVMWRLFRRRDPQETRSGSRRTSPGVTLQPCHVEELGVAGNIVRHIPDRGAPTRASEPASAAGHCPEWTVVFDLSAVEPAERPSRARLELRFAAAAAAAPEGGWELSVAQAGQGAGADPGPVLLRQLVPALGPPVRAELLGAAWARNASWPRSLRLALALRPRAPAACARLAEASLLLVTLDPRLCHPLARPRRDAEPVLGGGPGGACRARRLYVSFREVGWHRWVIAPRGFLANYCQGQCALPVALSGSGGPPALNHAVLRALMHAAAPGAADLPCCVPARLSPISVLFFDNSDNVVLRQYEDMVVDECGCR

SEQ ID NO: 178 - protein, 429 aa, Homo sapiens
MCPGALWVALPLLSLLAGSLQGKPLQSWGRGSAGGNAHSPLGVPGGGLPEHTFNLKMFLENVKVDFLRSLNLSGVPSQDKTRVEPPQYMIDLYNRYTSDKSTTPASNIVRSFSMEDAISITATEDFPFQKHILLFNISIPRHEQITRAELRLYVSCQNHVDPSHDLKGSVVIYDVLDGTDAWDSATETKTFLVSQDIQDEGWETLEVSSAVKRWVRSDSTKSKNKLEVTVESHRKGCDTLDISVPPGSRNLPFFVVFSNDHSSGTKETRLELREMISHEQESVLKKLSKDGSTEAGESSHEEDTDGHVAAGSTLARRKRSAGAGSHCQKTSLRVNFEDIGWDSWIIAPKEYEAYECKGGCFFPLADDVTPTKHAIVQTLVHLKFPTKVGKACCVPTKLSPISVLYKDDMGVPTLKYHYEGMSVAECGCR

SEQ ID NO: 179 - protein, 424 aa, Homo sapiens
MGSLVLTLCALFCLAAYLVSGSPIMNLEQSPLEEDMSLFGDVFSEQDGVDFNTLLQSMKDEFLKTLNLSDIPTQDSAKVDPPEYMLELYNKFATDRTSMPSANIIRSFKNEDLFSQPVSFNGLRKYPLLFNVSIPHHEEVIMAELRLYTLVQRDRMIYDGVDRKITIFEVLESKGDNEGERNMLVLVSGEIYGTNSEWETFDVTDAIRRWQKSGSSTHQLEVHIESKHDEAEDASSGRLEIDTSAQNKHNPLLIVFSDDQSSDKERKEELNEMISHEQLPELDNLGLDSFSSGPGEEALLQMRSNIIYDSTARIRRNAKGNYCKRTPLYIDFKEIGWDSWIIAPPGYEAYECRGVCNYPLAEHLTPTKHAIIQALVHLKNSQKASKACCVPTKLEPISILYLDKGVVTYKFKYEGMAVSECGCR

SEQ ID NO: 180 - protein, 450 aa, Homo sapiens
MDLSAAAALCLWLLSACRPRDGLEAAAVLRAAGAGPVRSPGGGGGGGGGGRTLAQAAGAAAVPAAAVPRARAARRAAGSGFRNGSVVPHHFMMSLYRSLAGRAPAGAAAVSASGHGRADTITGFTDQATQDESAAETGQSFLFDVSSLNDADEVVGAELRVLRRGSPESGPGSWTSPPLLLLSTCPGAARAPRLLYSRAAEPLVGQRWEAFDVADAMRRHRREPRPPRAFCLLLRAVAGPVPSPLALRRLGFGWPGGGGSAAEERAVLVVSSRTQRKESLFREIRAQARALGAALASEPLPDPGTGTASPRAVIGGRRRRRTALAGTRTAQGSGGGAGRGHGRRGRSRCSRKPLHVDFKELGWDDWIIAPLDYEAYHCEGLCDFPLRSHLEPTNHAIIQTLLNSMAPDAAPASCCVPARLSPISILYIDAANNVVYKQYEDMVVEACGCR

SEQ ID NO: 181 - protein, 392 aa, Homo sapiens
MVLLSILRILFLCELVLFMEHRAQMAEGGQSSIALLAEAPTLPLIEELLEESPGEQPRKPRLLGHSLRYMLELYRRSADSHGHPRENRTIGATMVRLVKPLTNVARPHRGTWHIQILGFPLRPNRGLYQLVRATVVYRHHLQLTRFNLSCHVEPWVQKNPTNHFPSSEGDSSKPSLMSNAWKEMDITQLVQQRFWNNKGHRILRLRFMCQQQKDSGGLELWHGTSSLDIAFLLLYFNDTHKSIRKAKFLPRGMEEFMERESLLRRTRQADGISAEVTASSSKHSGPENNQCSLHPFQISFRQLGWDHWIIAPPFYTPNYCKGTCLRVLRDGLNSPNHAIIQNLINQLVDQSVPRPSCVPYKYVPISVLMIEANGSILYKEYEGMIAESCTCR

SEQ ID NO: 182 - protein, 366 aa, Homo sapiens [sequence omitted]

SEQ ID NO: 183 - protein, 366 aa, Homo sapiens
MWPLWLCWALWVLPLAGPGAALTEEQLLGSLLRQLQLSEVPVLDRADMEKLVIPAHVRAQYVVLLRRSHGDRSRGKRFSQSFREVAGRFLASEASTHLLVFGMEQRLPPNSELVQAVLRLFQEPVPKAALHRHGRLSPRSAQARVTVEWLRVRDDGSNRTSLIDSRLVSVHESGWKAFDVTEAVNFWQQLSRPRQPLLLQVSVQREHLGPLASGAHKLVRFASQGAPAGLGEPQLELHTLDLRDYGAQGDCDPEAPMTEGTRCCRQEMYIDLQGMKWAKNWVLEPPGFLAYECVGTCQQPPEALAFNWPFLGPRQCIASETASLPMIVSIKEGGRTRPQVVSLPNMRVQKCSCASDGALVPRRLQP

SEQ ID NO: 184 - protein, 366 aa, Homo sapiens
MVLHLLLFLLLTPQGGHSCQGLELARELVLAKVRALFLDALGPPAVTREGGDPGVRRLPRRHALGGFTHRGSEPEEEEDVSQAILFPATDASCEDKSAARGLAQEAEEGLFRYMFRPSQHTRSRQVTSAQLWFHTGLDRQGTAASNSSEPLLGLLALSPGGPVAVPMSLGHAPPHWAVLHLATSALSLLTHPVLVLLLRCPLCTCSARPEATPFLVAHTRTRPPSGGERARRSTPLMSWPWSPSALRLLQRPPEEPAAHANCHRVALNISFQELGWERWIVYPPSFIFHYCHGGCGLHIPPNLSLPVPGAPPTPAQPYSLLPGAQPCCAALPGTMRPLHVRTTSDGGYSFKYETVPNLLTQHCACI

SEQ ID NO: 185 - protein, 426 aa, Homo sapiens
MPLLWLRGFLLASCWIIVRSSPTPGSEGHSAAPDCPSCALAALPKDVPNSQPEMVEAVKKHILNMLHLKKRPDVTQPVPKAALLNAIRKLHVGKVGENGYVEIEDDIGRRAEMNELMEQTSEIITFAESGTARKTLHFEISKEGSDLSVVERAEVWLFLKVPKANRTRTKVTIRLFQQQKHPQGSLDTGEEAEEVGLKGERSELLLSEKVVDARKSTWHVFPVSSSIQRLLDQGKSSLDVRIACEQCQESGASLVLLGKKKKKEEEGEGKKKGGGEGGAGADEEKEQSHRPFLMLQARQSEDHPHRRRRRGLECDGKVNICCKKQFFVSFKDIGWNDWIIAPSGYHANYCEGECPSHIAGTSGSSLSFHSTVINHYRMRGHSPFANLKSCCVPTKLRPMSMLYYDDGQNIIKKDIQNMIVEECGCS

SEQ ID NO: 186 - protein, 407 aa, Homo sapiens
MDGLPGRALGAACLLLLAAGWLGPEAWGSPTPPPTPAAPPPPPPPGSPGGSQDTCTSCGGFRRPEELGRVDGDFLEAVKRHILSRLQMRGRPNITHAVPKAAMVTALRKLHAGKVREDGRVEIPHLDGHASPGADGQERVSEIISFAETDGLASSRVRLYFFISNEGNQNLFVVQASLWLYLKLLPYVLEKGSRRKVRVKVYFQEQGHGDRWNMVEKRVDLKRSGWHTFPLTEAIQALFERGERRLNLDVQCDSCQELAVVPVFVDPGEESHRPFVVVQARLGDSRHRIRKRGLECDGRTNLCCRQQFFIDFRLIGWNDWIIAPTGYYGNYCEGSCPAYLAGVPGSASSFHTAVVNQYRMRGLNPGTVNSCCIPTKLSTMSMLYFDDEYNIVKRDVPNMIVEECGCA

SEQ ID NO: 187 - protein, 267 aa, Homo sapiens
MHLLLFQLLVLLPLGKTTRHQDGRQNQSSLSPVLLPRNQRELPTGNHEEAEEKPDLFVAVPHLVATSPAGEGQRQREKMLSRFGRFWKKPEREMHPSRDSDSEPFPPGTQSLIQPIDGMKMEKSPLREEAKKFWHHFMFRKTPASQGVILPIKSHEVHWETCRTVPFSQTITHEGCEKVVVQNNLCFGKCGSVHFPGAAQHSHTSCSHCLPAKFTTMHLPLNCTELSSVIKVVMLVEECQCKVKTEHEDGHILHAGSQDSFIPGVSA

SEQ ID NO: 188 - protein, 1038 aa, Homo sapiens
MTSSLQRPWRVPWLPWTILLVSTAAASQNQERLCAFKDPYQQDLGIGESRISHENGTILCSKGSTCYGLWEKSKGDINLVKQGCWSHIGDPQECHYEECVVTTTPPSIQNGTYRFCCCSTDLCNVNFTENFPPPDTTPLSPPHSFNRDETIIIALASVSVLAVLIVALCFGYRMLTGDRKQGLHSMNMMEAAASEPSLDLDNLKLLELIGRGRYGAVYKGSLDERPVAVKVFSFANRQNFINEKNIYRVPLMEHDNIARFIVGDERVTADGRMEYLLVMEYYPNGSLCKYLSLHTSDWVSSCRLAHSVTRGLAYLHTELPRGDHYKPAISHRDLNSRNVLVKNDGTCVISDFGLSMRLTGNRLVRPGEEDNAAISEVGTIRYMAPEVLEGAVNLRDCESALKQVDMYALGLIYWEIFMRCTDLFPGESVPEYQMAFQTEVGNHPTFEDMQVLVSREKQRPKFPEAWKENSLAVRSLKETIEDCWDQDAEARLTAQCAEERMAELMMIWERNKSVSPTVNPMSTAMQNERNLSHNRRVPKIGPYPDYSSSSYIEDSIHHTDSIVKNISSEHSMSSTPLTIGEKNRNSINYERQQAQARIPSPETSVTSLSTNTTTTNTTGLTPSTGMTTISEMPYPDETNLHTTNVAQSIGPTPVCLQLTEEDLETNKLDPKEVDKNLKESSDENLMEHSLKQFSGPDPLSSTSSSLLYPLIKLAVEATGQQDFTQTANGQACLIPDVLPTQIYPLPKQQNLPKRPTSLPLNTKNSTKEPRLKFGSKHKSNLKQVETGVAKMNTINAAEPHVVTVTMNGVAGRNHSVNSHAATTQYANGTVLSGQTTNIVTHRAQEMLQNQFIGEDTRLNINSSPDEHEPLLRREQQAGHDEGVLDRLVDRRERPLEGGRTNSNNNNSNPCSEQDVLAQGVPSTAADPGPSKPRRAQRPNSLDLSATNVLDGSSIQIGESTQDGKSGSGEKIKKRVKTPYSLKRWRPSTWVISTESLDCEVNNNGSNRAVHSKSSTAVYLAEGGTATTMVSKDIGMNCL

SEQ ID NO: 189 - protein, 794 aa, Homo sapiens
MELRPWLLWVVAATGTLVLLAADAQGQKVFTNTWAVRIPGGPAVANSVARKHGFLNLGQIFGDYYHFWHRGVTKRSLSPHRPRHSRLQREPQVQWLEQQVAKRRTKRDVYQEPTDPKFPQQWYLSGVTQRDLNVKAAWAQGYTGHGIVVSILDDGIEKNHPDLAGNYDPGASFDVNDQDPDPQPRYTQMNDNRHGTRCAGEVAAVANNGVCGVGVAYNARIGGVRMLDGEVTDAVEARSLGLNPNHIHIYSASWGPEDDGKTVDGPARLAEEAFFRGVSQGRGGLGSIFVWASGNGGREHDSCNCDGYTNSIYTLSISSATQFGNVPWYSEACSSTLATTYSSGNQNEKQIVTTDLRQKCTESHTGTSASAPLAAGIIALTLEANKNLTWRDMQHLVVQTSKPAHLNANDWATNGVGRKVSHSYGYGLLDAGAMVALAQNWTTVAPQRKCIIDILTEPKDIGKRLEVRKTVTACLGEPNHITRLEHAQARLTLSYNRRGDLAIHLVSPMGTRSTLLAARPHDYSADGFNDWAFMTTHSWDEDPSGEWVLEIENTSEANNYGTLTKFTLVLYGTAPEGLPVPPESSGCKTLTSSQACVVCEEGFSLHQKSCVQHCPPGFAPQVLDTHYSTENDVETIRASVCAPCHASCATCQGPALTDCLSCPSHASLDPVEQTCSRQSQSSRESPPQQQPPRLPPEVEAGQRLRAGLLPSHLPEVVAGLSCAFIVLVFVTVFLVLQLRSGFSFRGVKVYTMDRGLISYKGLPPEAWQEECPSDSEEDEGRGERTAFIKDQSAL

SEQ ID NO: 190 - protein, 390 aa, Homo sapiens
MPPSGLRLLLLLLPLLWLLVLTPGRPAAGLSTCKTIDMELVKRKRIEAIRGQILSKLRLASPPSQGEVPPGPLPEAVLALYNSTRDRVAGESAEPEPEPEADYYAKEVTRVLMVETHNEIYDKFKQSTHSIYMFFNTSELREAVPEPVLLSRAELRLLRLKLKVEQHVELYQKYSNNSWRYLSNRLLAPSDSPEWLSFDVTGVVRQWLSRGGEIEGFRLSAHCSCDSRDNTLQVDINGFTTGRRGDLATIHGMNRPFLLLMATPLERAQHLQSSRHRRALDTNYCFSSTEKNCCVRQLYIDFRKDLGWKWIHEPKGYHANFCLGPCPYIWSLDTQYSKVLALYNQHNPGASAAPCCVPQALEPLPIVYYVGRKPKVEQLSNMIVRSCKCS

SEQ ID NO: 191 - protein, 414 aa, Homo sapiens
MHYCVLSAFLILHLVTVALSLSTCSTLDMDQFMRKRIEAIRGQILSKLKLTSPPEDYPEPEEVPPEVISIYNSTRDLLQEKASRRAAACERERSDEEYYAKEVYKIDMPPFFPSENAIPPTFYRPYFRIVRFDVSAMEKNASNLVKAEFRVFRLQNPKARVPEQRIELYQILKSKDLTSPTQRYIDSKVVKTRAEGEWLSFDVTDAVHEWLHHKDRNLGFKISLHCPCCTFVPSNNYIIPNKSEELEARFAGIDGTSTYTSGDQKTIKSTRKKNSGKTPHLLLMLLPSYRLESQQTNRRKKRALDAAYCFRNVQDNCCLRPLYIDFKRDLGWKWIHEPKGYNANFCAGACPYLWSSDTQHSRVLSLYNTINPEASASPCCVSQDLEPLTILYYIGKTPKIEQLSNMIVKSCKCS

SEQ ID NO: 192 - protein, 202 aa, Homo sapiens
MLVAGFLLALPPSWAAGAPRAGRRPARPRGCADRPEELLEQLYGRLAAGVLSAFHHTLQLGPREQARNASCPAGGRPADRRFRPPTNLRSVSPWAYRISYDPARYPRYLPEAYCLCRGCLTGLFGEEDVRFRSAPVYMPTVVLRRTPACAGGRSVYTEAYVTIPVGCTCVPEPEKDADSINSSIDKQGAKLLLGPNDAPAGP

SEQ ID NO: 193 - protein, 1821 aa, Homo sapiens
MRPRTKARSPGRALRNPWRGFLPLTLALFVGAGHAQRDPVGRYEPAGGDANRLRRPGGSYPAAAAAKVYSLFREQDAPVAGLQPVERAQPGWGSPRRPTEAEARRPSRAQQSRRVQPPAQTRRSTPLGQQQPAPRTRAAPALPRLGTPQRSGAAPPTPPRGRLTGRNVCGGQCCPGWTTANSTNHCIKPVCEPPCQNRGSCSRPQLCVCRSGFRGARCEEVIPDEEFDPQNSRLAPRRWAERSPNLRRSSAAGEGTLARAQPPAPQSPPAPQSPPAGTLSGLSQTHPSQQHVGLSRTVRLHPTATASSQLSSNALPPGPGLEQRDGTQQAVPLEHPSSPWGLNLTEKIKKIKIVFTPTICKQTCARGHCANSCERGDTTTLYSQGGHGHDPKSGFRIYFCQIPCLNGGRCIGRDECWCPANSTGKFCHLPIPQPDREPPGRGSRPRALLEAPLKQSTFTLPLSNQLASVNPSLVKVHIHHPPEASVQIHQVAQVRGGVEEALVENSVETRPPPWLPASPGHSLWDSNNIPARSGEPPRPLPPAAPRPRGLLGRCYLNTVNGQCANPLLELTTQEDCCGSVGAFWGVTLCAPCPPRPASPVIENGQLECPQGYKRLNLTHCQDINECLTLGLCKDAECVNTRGSYLCTCRPGLMLDPSRSRCVSDKAISMLQGLCYRSLGPGTCTLPLAQRITKQICCCSRVGKAWGSECEKCPLPGTEAFREICPAGHGYTYASSDIRLSMRKAEEEELARPPREQGQRSSGALPGPAERQPLRVVTDTWLEAGTIPDKGDSQAGQVTTSVTHAPAWVTGNATTPPMPEQGIAEIQEEQVTPSTDVLVTLSTPGIDRCAAGATNVCGPGTCVNLPDGYRCVCSPGYQLHPSQAYCTDDNECLRDPCKGKGRCINRVGSYSCFCYPGYTLATSGATQECQDINECEQPGVCSGGQCTNTEGSYHCECDQGYIMVRKGHCQDINECRHPGTCPDGRCVNSPGSYTCLACEEGYRGQSGSCVDVNECLTPGVCAHGKCTNLEGSFRCSCEQGYEVTSDEKGCQDVDECASRASCPTGLCLNTEGSFACSACENGYWVNEDGTACEDLDECAFPGVCPSGVCTNTAGSFSCKDCDGGYRPSPLGDSCEDVDECEDPQSSCLGGECKNTVGSYQCLCPQGFQLANGTVCEDVNECMGEEHCAPHGECLNSHGSFFCLCAPGFVSAEGGTSCQDVDECATTDPCVGGHCVNTEGSFNCLCETGFQPSPESGECVDIDECEDYGDPVCGTWKCENSPGSYRCVLGCQPGFHMAPNGDCIDIDECANDTMCGSHGFCDNTDGSFRCLCDQGFEISPSGWDCVDVNECELMLAVCGAALCENVEGSFLCLCASDLEEYDAQEGHCRPRGAGGQSMSEAPTGDHAPAPTRMDCYSGQKGHAPCSSVLGRNTTQAECCCTQGASWGDACDLCPSEDSAEFSEICPSGKGYIPVEGAWTFGQTMYTDADECVIFGPGLCPNGRCLNTVPGYVCLCNPGFHYDASHKKCEDHDECQDLACENGECVNTEGSFHCFCSPPLTLDLSQQRCMNSTSSTEDLPDHDIHMDICWKKVTNDVCSEPLRGHRTTYTECCCQDGEAWSQQCALCPPRSSEVYAQLCNVARIEAEREAGVHFRPGYEYGPGPDDLHYSIYGPDGAPFYNYLGPEDTVPEPAFPNTAGHSADRTPILESPLQPSELQPHYVASHPEPPAGFEGLQAEECGILNGCENGRCVRVREGYTCDCFEGFQLDAAHMACVDVNECDDLNGPAVLCVHGYCENTEGSYRCHCSPGYVAEAGPPHCTAKE

SEQ ID NO: 194 - protein, 501 aa, Homo sapiens
MRLPKLLTFLLWYLAWLDLEFICTVLGAPDLGQRPQGTRPGLAKAEAKERPPLARNVFRPGGHSYGGGATNANARAKGGTGQTGGLTQPKKDEPKKLPPRPGGPEPKPGHPPQTRQATARTVTPKGQLPGGKAPPKAGSVPSSFLLKKAREPGPPREPKEPFRPPPITPHEYMLSLYRTLSDADRKGGNSSVKLEAGLANTITSFIDKGQDDRGPVVRKQRYVFDISALEKDGLLGAELRILRKKPSDTAKPAAPGGGRAAQLKLSSCPSGRQPASLLDVRSVPGLDGSGWEVFDIWKLFRNFKNSAQLCLELEAWERGRAVDLRGLGFDRAARQVHEKALFLVFGRTKKRDLFFNEIKARSGQDDKTVYEYLFSQRRKRRAPLATRQGKRPSKNLKARCSRKALHVNFKDMGWDDWIIAPLEYEAFHCEGLCEFPLRSHLEPTNHAVIQTLMNSMDPESTPPTCCVPTRLSPISILFIDSANNVVYKQYEDMVVESCGCR

SEQ ID NO: 195 - protein, 184 aa, Homo sapiens
MSRTAYTVGALLLLLGTLLPAAEGKKKGSQGAIPPPDKAQHNDSEQTQSPQQPGSRNRGRGQGRGTAMPGEEVLESSQEALHVTERKYLKRDWCKTQPLKQTIHEEGCNSRTIINRFCYGQCNSFYIPRHIRKEEGSFQSCSFCKPKKFTTMMVTLNCPELQPPTKKKRVTRVKQCRCISIDLD

SEQ ID NO: 196 - protein, 108 aa, Homo sapiens
MKALCLLLLPVLGLLVSSKTLCSMEEAINERIQEVAGSLIFRAISSIGLECQSVTSRGDLATCPRGFAVTGCTCGSACGSWDVRAETTCHCQCAGMDWTGARCCRVQP

SEQ ID NO: 197 - protein, 323 aa, Homo sapiens
MAYVPAPGYQPTYNPTLPYYQPIPGGLNVGMSVYIQGVASEHMKRFFVNFVVGQDPGSDVAFHFNPRFDGWDKVVFNTLQGGKWGSEERKRSMPFKKGAAFELVFIVLAEHYKVVVNGNPFYEYGHRLPLQMVTHLQVDGDLQLQSINFIGGQPLRPQGPPMMPPYPGPGHCHQQLNSLPTMEGPPTFNPPVPYFGRLQGGLTARRTIIIKGYVPPTGKSFAINFKVGSSGDIALHINPRMGNGTVVRNSLLNGSWGSEEKKITHNPFGPGQFFDLSIRCGLDRFKVYANGQHLFDFAHRLSAFQRVDTLEIQGDVTLSYVQI

SEQ ID NO: 198 - protein, 244 aa, Homo sapiens
MLLLGAVLLLLALPGHDQETTTQGPGVLLPLPKGACTGWMAGIPGHPGHNGAPGRDGRDGTPGEKGEKGDPGLIGPKGDIGETGVPGAEGPRGFPGIQGRKGEPGEGAYVYRSAFSVGLETYVTIPNMPIRFTKIFYNQQNHYDGSTGKFHCNIPGLYYFAYHITVYMKDVKVSLFKKDKAMLFTYDQYQENNVDQASGSVLLHLEVGDQVWLQVYGEGERNGLYADNDNDSTFTGFLLYHDTN

SEQ ID NO: 199 - protein, 245 aa, Homo sapiens
MDVGPSSLPHLGLKLLLLLLLLPLRGQANTGCYGIPGMPGLPGAPGKDGYDGLPGPKGEPGIPAIPGIRGPKGQKGEPGLPGHPGKNGPMGPPGMPGVPGPMGIPGEPGEEGRYKQKFQSVFTVTRQTHQPPAPNSLIRFNAVLTNPQGDYDTSTGKFTCKVPGLYYFVYHASHTANLCVLLYRSGVKVVTFCGHTSKTNQVNSGGVLLRLQVGEEVWLAVNDYYDMVGIQGSDSVFSGFLLFPD

SEQ ID NO: 200 - protein, 672 aa, Homo sapiens
MRAGRGATPARELFRDAAFPAADSSLFCDLSTPLAQFREDITWRRPQEICATPRLFPDDPREGQVKQGLLGDCWFLCACAALQKSRHLLDQVIPPGQPSWADQEYRGSFTCRIWQFGRWVEVTTDDRLPCLAGRLCFSRCQREDVFWLPLLEKVYAKVHGSYEHLWAGQVADALVDLTGGLAERWNLKGVAGSGGQQDRPGRWEHRTCRQLLHLKDQCLISCCVLSPRAGARELGEFHAFIVSDLRELQGQAGQCILLLRIQNPWGRRCWQGLWREGGEGWSQVDAAVASELLSQLQEGEFWVEEEEFLREFDELTVGYPVTEAGHLQSLYTERLLCHTRALPGAWVKGQSAGGCRNNSGFPSNPKFWLRVSEPSEVYIAVLQRSRLHAADWAGRARALVGDSHTSWSPASIPGKHYQAVGLHLWKVEKRRVNLPRVLSMPPVAGTACHAYDREVHLRCELSPGYYLAVPSTFLKDAPGEFLLRVFSTGRVSLSAIRAVAKNTTPGAALPAGEWGTVQLRGSWRVGQTAGGSRNFASYPTNPCFPFSVPEGPGPRCVRITLHQHCRPSDTEFHPIGFHIFQVPEGGRSQDAPPLLLQEPLLSCVPHRYAQEVSRLCLLPAGTYKVVPSTYLPDTEGAFTVTIATRIDRPSIHSQEMLGQFLQEVSIMAVMKT

SEQ ID NO: 201 - protein, 544 aa, Homo sapiens
MRAGRGATPARELFRDAAFPAADSSLFCDLSTPLAQFREDITWRRPQEICATPRLFPDDPREGQVKQGLLGDCWFLCACAALQKSRHLLDQVIPPGQPSWADQEYRGSFTCRIWQFGRWVEVTTDDRLPCLAGRLCFSRCQREDVFWLPLLEKVYAKVHGSYEHLWAGQVADALVDLTGGLAERWNLKGVAGSGGQQDRPGRWEHRTCRQLLHLKDQCLISCCVLSPRAGARELGEFHAFIVSDLRELQGQAGQCILLLRIQNPWGRRCWQGLWREGGEGWSQVDAAVASELLSQLQEGEFWVEEEEFLREFDELTVGYPVTEAGHLQSLYTERLLCHTRALPGAWVKGQSAGGCRNNSGFPSNPKFWLRVSEPSEVYIAVLQRSRLHAADWAGRARALVGDSHTSWSPASIPGKHYQAVGLHLWKVEKRRVNLPRVLSMPPVAGTACHAYDREVHLRCELSPGYYLAVPSTFLKDAPGEFLLRVFSTGRVSLRALAPAASASLCISTAGPVTPSSTPSASISSRSQRVEGARTHPHCCCRSRC

SEQ ID NO: 202 - protein, 517 aa, Homo sapiens
MRAGRGATPARELFRDAAFPAADSSLFCDLSTPLAQFREDITWRRPQEICATPRLFPDDPREGQVKQGLLGDCWFLCACAALQKSRHLLDQVIPPGQPSWADQEYRGSFTCRIWQFGRWVEVTTDDRLPCLAGRLCFSRCQREDVFWLPLLEKVYAKVHGSYEHLWAGQVADALVDLTGGLAERWNLKGVAGSGGQQDRPGRWEHRTCRQLLHLKDQCLISCCVLSPRAGARELGEFHAFIVSDLRELQGQAGQCILLLRIQNPWGRRCWQGLWREGGEGWSQVDAAVASELLSQLQEGEFWVEEEEFLREFDELTVGYPVTEAGHLQSLYTERLLCHTRALPGAWVKGQSAGGCRNNSGFPSNPKFWLRVSEPSEVYIAVLQRSRLHAADWAGRARALVGDSHTSWSPASIPGKHYQAVGLHLWKVPEGGRSQDAPPLLLQEPLLSCVPHRYAQEVSRLCLLPAGTYKVVPSTYLPDTEGAFTVTIATRIDRPSIHSQEMLGQFLQEVSIMAVMKT

SEQ ID NO: 203 - protein, 370 aa, Homo sapiens
MHRLIFVYTLICANFCSCRDTSATPQSASIKALRNANLRRDESNHLTDLYRRDETIQVKGNGYVQSPRFPNSYPRNLLLTWRLHSQENTRIQLVFDNQFGLEEAENDICRYDFVEVEDISETSTIIRGRWCGHKEVPPRIKSRTNQIKITFKSDDYFVAKPGFKIYYSLLEDFQPAAASETNWESVTSSISGVSYNSPSVTDPTLIADALDKKIAEFDTVEDLLKYFNPESWQEDLENMYLDTPRYRGRSYHDRKSKVDLDRLNDDAKRYSCTPRNYSVNIREELKLANVVFFPRCLLVQRCGGNCGCGTVNWRSCTCNSGKTVKKYHEVLQFEPGHIKRRGRAKTMALVDIQLDHHERCDCICSSRPPR

SEQ ID NO: 204 - protein, 281 aa, Homo sapiens
MQQPFNYPYPQIYWVDSSASSPWAPPGTVLPCPTSVPRRPGQRRPPPPPPPPPLPPPPPPPPLPPLPLPPLKKRGNHSTGLCLLVMFFMVLVALVGLGLGMFQLFHLQKELAELRESTSQMHTASSLEKQIGHPSPPPEKKELRKVAHLTGKSNSRSMPLEWEDTYGIVLLSGVKYKKGGLVINETGLYFVYSKVYFRGQSCNNLPLSHKVYMRNSKYPQDLVMMEGKMMSYCTTGQMWARSSYLGAVFNLTSADHLYVNVSELSLVNFEESQTFFGLYKL

SEQ ID NO: 205 - protein, 1447 aa, Homo sapiens
MASAGNAAEPQDRGGGGSGCIGAPGRPAGGGRRRRTGGLRRAAAPDRDYLHRPSYCDAAFALEQISKGKATGRKAPLWLRAKFQRLLFKLGCYIQKNCGKFLVVGLLIFGAFAVGLKAANLETNVEELWVEVGGRVSRELNYTRQKIGEEAMFNPQLMIQTPKEEGANVLTTEALLQHLDSALQASRVHVYMYNRQWKLEHLCYKSGELITETGYMDQIIEYLYPCLIITPLDCFWEGAKLQSGTAYLLGKPPLRWTNFDPLEFLEELKKINYQVDSWEEMLNKAEVGHGYMDRPCLNPADPDCPATAPNKNSTKPLDMALVLNGGCHGLSRKYMHWQEELIVGGTVKNSTGKLVSAHALQTMFQLMTPKQMYEHFKGYEYVSHINWNEDKAAAILEAWQRTYVEVVHQSVAQNSTQKVLSFTTTTLDDILKSFSDVSVIRVASGYLLMLAYACLTMLRWDCSKSQGAVGLAGVLLVALSVAAGLGLCSLIGISFNAATTQVLPFLALGVGVDDVFLLAHAFSETGQNKRIPFEDRTGECLKRTGASVALTSISNVTAFFMAALIPIPALRAFSLQAAVVVVFNFAMVLLIFPAILSMDLYRREDRRLDIFCCFTSPCVSRVIQVEPQAYTDTHDNTRYSPPPPYSSHSFAHETQITMQSTVQLRTEYDPHTHVYYTTAEPRSEISVQPVTVTQDTLSCQSPESTSSTRDLLSQFSDSSLHCLEPPCTKWTLSSFAEKHYAPFLLKPKAKVVVIFLFLGLLGVSLYGTTRVRDGLDLTDIVPRETREYDFIAAQFKYFSFYNMYIVTQKADYPNIQHLLYDLHRSFSNVKYVMLEENKQLPKMWLHYFRDWLQGLQDAFDSDWETGKIMPNNYKNGSDDGVLAYKLLVQTGSRDKPIDISQLTKQRLVDADGIINPSAFYIYLTAWVSNDPVAYAASQANIRPHRPEWVHDKADYMPETRLRIPAAEPIEYAQFPFYLNGLRDTSDFVEAIEKVRTICSNYTSLGLSSYPNGYPFLFWEQYIGLRHWLLLFISVVLACTFLVCAVFLLNPWTAGIIVMVLALMTVELFGMMGLIGIKLSAVPVVILIASVGIGVEFTVHVALAFLTAIGDKNRRAVLALEHMFAPVLDGAVSTLLGVLMLAGSEFDFIVRYFFAVLAILTILGVLNGLVLLPVLLSFFGPYPEVSPANGLNRLPTPSPEPPPSVVRFAMPPGHTHSGSDSSDSEYSSQTTVSGLSEELRHYEAQQGAGGPAHQVIVEATENPVFAHSTVVHPESRHHPPSNPRQQPHLDSGSLPPGRQGQQPRRDPPREGLWPPPYRPRRDAFEISTEGHSGPSNRARWGPRGARSHNPRNPASTAMGSSVPGYCQPITTVTASASVTVAVHPPPVPGPGRNPRGGLCPGYPETDHGLFEDPHVPFHVRCERRDSKVEVIELQDVECEERPRGSSSN

SEQ ID NO: 206 - protein, 1203 aa, Homo sapiens
MTRSPPLRELPPSYTPPARTAAPQILAGSLKAPLWLRAYFQGLLFSLGCGIQRHCGKVLFLGLLAFGALALGLRMAIIETNLEQLWVEVGSRVSQELHYTKEKLGEEAAYTSQMLIQTARQEGENILTPEALGLHLQAALTASKVQVSLYGKSWDLNKICYKSGVPLIENGMIERMIEKLFPCVILTPLDCFWEGAKLQGGSAYLPGRPDIQWTNLDPEQLLEELGPFASLEGFRELLDKAQVGQAYVGRPCLHPDDLHCPPSAPNHHSRQAPNVAHELSGGCHGFSHKFMHWQEELLLGGMARDPQGELLRAEALQSTFLLMSPRQLYEHFRGDYQTHDIGWSEEQASTVLQAWQRRFVQLAQEALPENASQQIHAFSSTTLDDILHAFSEVSAARVVGGYLLMLAYACVTMLRWDCAQSQGSVGLAGVLLVALAVASGLGLCALLGITFNAATTQVLPFLALGIGVDDVFLLAHAFTEALPGTPLQERMGECLQRTGTSVVLTSINNMAAFLMAALVPIPALRAFSLQAAIVVGCTFVAVMLVFPAILSLDLRRRHCQRLDVLCCFSSPCSAQVIQILPQELGDGTVPVGIAHLTATVQAFTHCEASSQHVVTILPPQAHLVPPPSDPLGSELFSPGGSTRDLLGQEEETRQKAACKSLPCARWNLAHFARYQFAPLLLQSHAKAIVLVLFGALLGLSLYGATLVQDGLALTDVVPRGTKEHAFLSAQLRYFSLYEVALVTQGGFDYAHSQRALFDLHQRFSSLKAVLPPPATQAPRTWLHYYRNWLQGIQAAFDQDWASGRITRHSYRNGSEDGALAYKLLIQTGDAQEPLDFSQLTTRKLVDREGLIPPELFYMGLTVWVSSDPLGLAASQANFYPPPPEWLHDKYDTTGENLRIPPAQPLEFAQFPFLLRGLQKTADFVEAIEGARAACAEAGQAGVHAYPSGSPFLFWEQYLGLRRCFLLAVCILLVCTFLVCALLLLNPWTAGLIVLVLAMMTVELFGIMGFLGIKLSAIPVVILVASVGIGVEFTVHVALGFLTTQGSRNLRAAHALEHTFAPVTDGAISTLLGLLMLAGSHFDFIVRYFFAALTVLTLLGLLHGLVLLPVLLSILGPPPEVIQMYKESPEILSPPAPQGGGLRWGASSSLPQSFARVTTSMTVAIHPPPLPGAYIHPAPDEPPWSPAATSSGNLSSRGPGPATG

SEQ ID NO: 207 - protein, 375 aa, Homo sapiens
MDALQLANSAFAVDLFKQLCEKEPLGNVLFSPICLSTSLSLAQVGAKGDTANEIGQVLHFENVKDVPFGFQTVTSDVNKLSSFYSLKLIKRLYVDKSLNLSTEFISSTKRPYAKELETVDFKDKLEETKGQINNSIKDLTDGHFENILADNSVNDQTKILVVNAAYFVGKWMKKFSESETKECPFRVNKTDTKPVQMMNMEATFCMGNIDSINCKIIELPFQNKHLSMFILLPKDVEDESTGLEKIEKQLNSESLSQWTNPSTMANAKVKLSIPKFKVEKMIDPKACLENLGLKHIFSEDTSDFSGMSETKGVALSNVIHKVCLEITEDGGDSIEVPGARILQHKDELNADHPFIYIIRHNKTRNIIFFGKFCSP

SEQ ID NO: 208 - protein, 1754 aa, Homo sapiens
MAPYPCGCHILLLLFCCLAAARANLLNLNWLWFNNEDTSHAATTIPEPQGPLPVQPTADTTTHVTPRNGSTEPATAPGSPEPPSELLEDGQDTPTSAESPDAPEENIAGVGAEILNVAKGIRSFVQLWNDTVPTESLARAETLVLETPVGPLALAGPSSTPQENGTTLWPSRGIPSSPGAHTTEAGTLPAPTPSPPSLGRPWAPLTGPSVPPPSSGRASLSSLLGGAPPWGSLQDPDSQGLSPAAAAPSQQLQRPDVRLRTPLLHPLVMGSLGKHAAPSAFSSGLPGALSQVAVTTLTRDSGAWVSHVANSVGPGLANNSALLGADPEAPAGRCLPLPPSLPVCGHLGISRFWLPNHLHHESGEQVRAGARAWGGLLQTHCHPFLAWFFCLLLVPPCGSVPPPAPPPCCQFCEALQDACWSRLGGGRLPVACASLPTQEDGYCVLIGPAAERISEEVGLLQLLGDPPPQQVTQTDDPDVGLAYVFGPDANSGQVARYHFPSLFFRDFSLLFHIRPATEGPGVLFAITDSAQAMVLLGVKLSGVQDGHQDISLLYTEPGAGQTHTAASFRLPAFVGQWTHLALSVAGGFVALYVDCEEFQRMPLARSSRGLELEPGAGLFVAQAGGADPDKFQGVIAELKVRRDPQVSPMHCLDEEGDDSDGASGDSGSGLGDARELLREETGAALKPRLPAPPPVTTPPLAGGSSTEDSRSEEVEEQTTVASLGAQTLPGSDSVSTWDGSVRTPGGRVKEGGLKGQKGEPGVPGPPGRAGPPGSPCLPGPPGLPCPVSPLGPAGPALQTVPGPQGPPGPPGRDGTPGRDGEPGDPGEDGKPGDTGPQGFPGTPGDVGPKGDKGDPGVGERGPPGPQGPPGPPGPSFRHDKLTFIDMEGSGFGGDLEALRGPRGFPGPPGPPGVPGLPGEPGRFGVNSSDVPGPAGLPGVPGREGPPGFPGLPGPPGPPGREGPPGRTGQKGSLGEAGAPGHKGSKGAPGPAGARGESGLAGAPGPAGPPGPPGPPGPPGPGLPAGFDDMEGSGGPFWSTARSADGPQGPPGLPGLKGDPGVPGLPGAKGEVGADGVPGFPGLPGREGIAGPQGPKGDRGSRGEKGDPGKDGVGQPGLPGPPGPPGPVVYVSEQDGSVLSVPGPEGRPGFAGFPGPAGPKGNLGSKGERGSPGPKGEKGEPGSIFSPDGGALGPAQKGAKGEPGFRGPPGPYGRPGYKGEIGFPGRPGRPGMNGLKGEKGEPGDASLGFGMRGMPGPPGPPGPPGPPGTPVYDSNVFAESSRPGPPGLPGNQGPPGPKGAKGEVGPPGPPGQFPFDFLQLEAEMKGEKGDRGDAGQKGERGEPGGGGFFGSSLPGPPGPPGPPGPRGYPGIPGPKGESIRGQPGPPGPQGPPGIGYEGRQGPPGPPGPPGPPSFPGPHRQTISVPGPPGPPGPPGPPGTMGASSGVRLWATRQAMLGQVHEVPEGWLIFVAEQEELYVRVQNGFRKVQLEARTPLPRGTDNEVAALQPPVVQLHDSNPYPRREHPHPTARPWRADDILASPPRLPEPQPYPGAPHHSSYVHLRPARPTSPPAHSHRDFQPVLHLVALNSPLSGGMRGIRGADFQCFQQARAVGLAGTFRAFLSSRLQDLYSIVRRADRAAVPIVNLKDELLFPSWEALFSGSEGPLKPGARIFSFDGKDVLRHPTWPQKSVWHGSDPNGRRLTESYCETWRTEAPSATGQASSLLGGRLLGQSAASCHHAYIVLCIENSFMTASK

SEQ ID NO: 209 - protein, 155 aa, Homo sapiens
MAEGEITTFTALTEKFNLPPGNYKKPKLLYCSNGGHFLRILPDGTVDGTRDRSDQHIQLQLSAESVGEVYIKSTETGQYLAMDTDGLLYGSQTPNEECLFLERLEENHYNTYISKKHAEKNWFVGLKKNGSCKRGPRTHYGQKAILFLPLPVSSD

SEQ ID NO: 210 - protein, 288 aa, Homo sapiens
MVGVGGGDVEDVTPRPGGCQISGRGARGCNGIPGAAAWEAALPRRRPRRHPSVNPRSRAAGSPRTRGRRTEERPSGSRLGDRGRGRALPGGRLGGRGRGRAPERVGGRGRGRGTAAPRAAPAARGSRPGPAGTMAAGSITTLPALPEDGGSGAFPPGHFKDPKRLYCKNGGFFLRIHPDGRVDGVREKSDPHIKLQLQAEERGVVSIKGVCANRYLAMKEDGRLLASKCVTDECFFFERLESNNYNTYRSRKYTSWYVALKRTGQYKLGSKTGPGQKAILFLPMSAKS

SEQ ID NO: 211 - protein, 239 aa, Homo sapiens
MGLIWLLLLSLLEPGWPAAGPGARLRRDAGGRGGVYEHLGGAPRRRKLYCATKYHLQLHPSGRVNGSLENSAYSILEITAVEVGIVAIRGLFSGRYLAMNKRGRLYASEHYSAECEFVERIHELGYNTYASRLYRTVSSTPGARRQPSAERLWYVSVNGKGRPRRGFKTRRTQKSSLFLPRVLDHRDHEMVRQLQSGLPRPPGKGVQPRRRRQKQSPDNLEPSHVQASRLGSQLEASAH

SEQ ID NO: 212 - protein, 206 aa, Homo sapiens
MSGPGTAAVALLPAVLLALLAPWAGRGGAAAPTAPNGTLEAELERRWESLVALSLARLPVAAQPKEAAVQSGAGDYLLGIKRLRRLYCNVGIGFHLQALPDGRIGGAHADTRDSLLELSPVERGVVSIFGVASRFFVAMSSKGKLYGSPFFTDECTFKEILLPNNYNAYESYKYPGMFIALSKNGKTKKGNRVSPTMKVTHFLPRL

SEQ ID NO: 213 - protein, 268 aa, Homo sapiens
MSLSFLLLLFFSHLILSAWAHGEKRLAPKGQPGPAATDRNPRGSSSRQSSSSAMSSSSASSSPAASLGSQGSGLEQSSFQWSPSGRRTGSLYCRVGIGFHLQIYPDGKVNGSHEANMLSVLEIFAVSQGIVGIRGVFSNKFLAMSKKGKLHASAKFTDDCKFRERFQENSYNTYASAIHRTEKTGREWYVALNKRGKAKRGCSPRVKPQHISTHFLPRFKQSEQPELSFTVTVPEKKKPPSPIKPKIPLSAPRKNTNSVKYRLKFRFG

SEQ ID NO: 214 - protein, 208 aa, Homo sapiens
MALGQKLFITMSRGAGRLQGTLWALVFLGILVGMVVPSPAGTRANNTLLDSRGWGTLLSRSRAGLAGEIAGVNWESGYLVGIKRQRRLYCNVGIGFHLQVLPDGRISGTHEENPYSLLEISTVERGVVSLFGVRSALFVAMNSKGRLYATPSFQEECKFRETLLPNNYNAYESDLYQGTYIALSKYGRVKRGSKVSPIMTVTHFLPRI

SEQ ID NO: 215 - protein, 233 aa, Homo sapiens
MGSPRSALSCLLLHLLVLCLQAQEGPGRGPALGRELASLFRAGREPQGVSQQHVREQSLVTDQLSRRLIRTYQLYSRTSGKHVQVLANKRINAMAEDGDPFAKLIVETDTFGSRVRVRGAETGLYICMNKKGKLIAKSNGKGKDCVFTEIVLENNYTALQNAKYEGWYMAFTRKGRPRKGSKTRQHQREVHFMKRLPRGHHTTEQSLRFEFLNYPPFTRSLRGSQRTWAPEPR

SEQ ID NO: 216 - protein, 208 aa, Homo sapiens
MAPLGEVGNYFGVQDAVPFGNVPVLPVDSPVLLSDHLGQSEAGGLPRGPAVTDLDHLKGILRRRQLYCRTGFHLEIFPNGTIQGTRKDHSRFGILEFISIAVGLVSIRGVDSGLYLGMNEKGELYGSEKLTQECVFREQFEENWYNTYSSNLYKHVDTGRRYYVALNKDGTPREGTRTKRHQKFTHFLPRPVDPDKVPELYKDILSQS

SEQ ID NO: 217 - protein, 243 aa, Homo sapiens
MAAAIASSLIRQKRQARESNSDRVSASKRRSSPSKDGRSLCERHVLGVFSKVRFCSGRKRPVRRRPEPQLKGIVTRLFSQQGYFLQMHPDGTIDGTKDENSDYTLFNLIPVGLRVVAIQGVKASLYVAMNGEGYLYSSDVFTPECKFKESVFENYYVIYSSTLYRQQESGRAWFLGLNKEGQIMKGNRVKKTKPSSHFVPKPIEVCMYREPSLHEIGEKQGRSRKSSGTPTMNGGKVVNQDST

SEQ ID NO: 218 - protein, 216 aa, Homo sapiens
MRSGCVVVHVWILAGLWLAVAGRPLAFSDAGPHVHYGWGDPIRLRHLYTSGPHGLSSCFLRIRADGVVDCARGQSAHSLLEIKAVALRTVAIKGVHSVRYLCMGADGKMQGLLQYSEEDCAFEEEIRPDGYNVYRSEKHRLPVSLSSAKQRQLYKNRGFLPLSHFLPMLPMVPEEPEDLRGHLESDMFSSPLETDSMDPFGLVTGLEAVRSPSFEK

SEQ ID NO: 219 - protein, 207 aa, Homo sapiens
MAEVGGVFASLDWDLHGFSSSLGNVPLADSPGFLNERLGQIEGKLQRGSPTDFAHLKGILRRRQLYCRTGFHLEIFPNGTVHGTRHDHSRFGILEFISLAVGLISIRGVDSGLYLGMNERGELYGSKKLTRECVFREQFEENWYNTYASTLYKHSDSERQYYVALNKDGSPREGYRTKRHQKFTHFLPRPVDPSKLPSMSRDLFHYR

SEQ ID NO: 220 - protein, 207 aa, Homo sapiens
MYSAPSACTCLCLHFLLLCFQVQVLVAEENVDFRIHVENQTRARDDVSRKQLRLYQLYSRTSGKHIQVLGRRISARGEDGDKYAQLLVETDTFGSQVRIKGKETEFYLCMNRKGKLVGKPDGTSKECVFIEKVLENNYTALMSAKYSGWYVGFTKKGRPRKGPKTRENQQDVHFMKRYPKGQPELQKPFKYTTVTKRSRRIRPTHPA

SEQ ID NO: 221 - protein, 235 aa, Homo sapiens
MTVLAPAWSPTTYLLLLLLLSSGLSGTQDCSFQHSPISSDFAVKIRELSDYLLQDYPVTVASNLQDEELCGGLWRLVLAQRWMERLKTVAGSKMQGLLERVNTEIHFVTKCAFQPPPSCLRFVQTNISRLLQETSEQLVALKPWITRQNFSRCLELQCQPDSSTLPPPWSPRPLEATAPTAPQPPLLLLLLLPVGLLLLAAAWCLHWQRTRRRTPRPGEQVPPVPSPQDLLLVEH

SEQ ID NO: 222 - protein, 110 aa, Homo sapiens
APMAEGGGQNHHEVVKFMDVYQRSYCHPIETLVDIFQEYPDEIEYIFKPSCVPLMRCGGCCNDEGLECVPTEESNITMQIMRIKPHQGQHIGEMSFLQHNKCECRPKKDR

SEQ ID NO: 223 - protein, 147 aa, Homo sapiens
MNFLLSWVHWSLALLLYLHHAKWSQAAPMAEGGGQNHHEVVKFMDVYQRSYCHPIETLVDIFQEYPDEIEYIFKPSCVPLMRCGGCCNDEGLECVPTEESNITMQIMRIKPHQGQHIGEMSFLQHNKCECRPKKDRARQEKCDKPRR

SEQ ID NO: 224 - protein, 145 aa, Homo sapiens
APMAEGGGQNHHEVVKFMDVYQRSYCHPIETLVDIFQEYPDEIEYIFKPSCVPLMRCGGCCNDEGLECVPTEESNITMQIMRIKPHQGQHIGEMSFLQHNKCECRPKKDRARQEKKSVRGKGKGQKRKRKKSRYKSWSVCDKPRR

SEQ ID NO: 225 - protein, 191 aa, Homo sapiens
MNFLLSWVHWSLALLLYLHHAKWSQAAPMAEGGGQNHHEVVKFMDVYQRSYCHPIETLVDIFQEYPDEIEYIFKPSCVPLMRCGGCCNDEGLECVPTEESNITMQIMRIKPHQGQHIGEMSFLQHNKCECRPKKDRARQENPCGPCSERRKHLFVQDPQTCKCSCKNTDSRCKARQLELNERTCRCDKPRR

SEQ ID NO: 226 - protein, 215 aa, Homo sapiens
MNFLLSWVHWSLALLLYLHHAKWSQAAPMAEGGGQNHHEVVKFMDVYQRSYCHPIETLVDIFQEYPDEIEYIFKPSCVPLMRCGGCCNDEGLECVPTEESNITMQIMRIKPHQGQHIGEMSFLQHNKCECRPKKDRARQEKKSVRGKGKGQKRKRKKSRYKSWSVPCGPCSERRKHLFVQDPQTCKCSCKNTDSRCKARQLELNERTCRCDKPRR

SEQ ID NO: 227 - protein, 232 aa, Homo sapiens
MNFLLSWVHWSLALLLYLHHAKWSQAAPMAEGGGQNHHEVVKFMDVYQRSYCHPIETLVDIFQEYPDEIEYIFKPSCVPLMRCGGCCNDEGLECVPTEESNITMQIMRIKPHQGQHIGEMSFLQHNKCECRPKKDRARQEKKSVRGKGKGQKRKRKKSRYKSWSVYVGARCCLMPWSLPGPHPCGPCSERRKHLFVQDPQTCKCSCKNTDSRCKARQLELNERTCRCDKPRR

SEQ ID NO: 228 - protein, 345 aa, Homo sapiens
MSLFGLLLLTSALAGQRQGTQAESNLSSKFQFSSNKEQNGVQDPQHERIITVSTNGSIHSPRFPHTYPRNTVLVWRLVAVEENVWIQLTFDERFGLEDPEDDICKYDFVEVEEPSDGTILGRWCGSGTVPGKQISKGNQIRIRFVSDEYFPSEPGFCIHYNIVMPQFTEAVSPSVLPPSALPLDLLNNAITAFSTLEDLIRYLEPERWQLDLEDLYRPTWQLLGKAFVFGRKSRVVDLNLLTEEVRLYSCTPRNFSVSIREELKRTDTIFWPGCLLVKRCGGNCACCLHNCNECQCVPSKVTKKYHEVLQLRPKTGVRGLHKSLTDVALEHHEECDCVCRGSTGG

SEQ ID NO: 229 - protein, 1356 aa, Homo sapiens
MQSKVLLAVALWLCVETRAASVGLPSVSLDLPRLSIQKDILTIKANTTLQITCRGQRDLDWLWPNNQSGSEQRVEVTECSDGLFCKTLTIPKVIGNDTGAYKCFYRETDLASVIYVYVQDYRSPFIASVSDQHGVVYITENKNKTVVIPCLGSISNLNVSLCARYPEKRFVPDGNRISWDSKKGFTIPSYMISYAGMVFCEAKINDESYQSIMYIVVVVGYRIYDVVLSPSHGIELSVGEKLVLNCTARTELNVGIDFNWEYPSSKHQHKKLVNRDLKTQSGSEMKKFLSTLTIDGVTRSDQGLYTCAASSGLMTKKNSTFVRVHEKPFVAFGSGMESLVEATVGERVRIPAKYLGYPPPEIKWYKNGIPLESNHTIKAGHVLTIMEVSERDTGNYTVILTNPISKEKQSHVVSLVVYVPPQIGEKSLISPVDSYQYGTTQTLTCTVYAIPPPHHIHWYWQLEEECANEPSQAVSVTNPYPCEEWRSVEDFQGGNKIEVNKNQFALIEGKNKTVSTLVIQAANVSALYKCEAVNKVGRGERVISFHVTRGPEITLQPDMQPTEQESVSLWCTADRSTFENLTWYKLGPQPLPIHVGELPTPVCKNLDTLWKLNATMFSNSTNDILIMELKNASLQDQGDYVCLAQDRKTKKRHCVVRQLTVLERVAPTITGNLENQTTSIGESIEVSCTASGNPPPQIMWFKDNETLVEDSGIVLKDGNRNLTIRRVRKEDEGLYTCQACSVLGCAKVEAFFIIEGAQEKTNLEIIILVGTAVIAMFFWLLLVIILRTVKRANGGELKTGYLSIVMDPDELPLDEHCERLPYDASKWEFPRDRLKLGKPLGRGAFGQVIEADAFGIDKTATCRTVAVKMLKEGATHSEHRALMSELKILIHIGHHLNVVNLLGACTKPGGPLMVIVEFCKFGNLSTYLRSKRNEFVPYKTKGARFRQGKDYVGAIPVDLKRRLDSITSSQSSASSGFVEEKSLSDVEEEEAPEDLYKDFLTLEHLICYSFQVAKGMEFLASRKCIHRDLAARNILLSEKNVVKICDFGLARDIYKDPDYVRKGDARLPLKWMAPETIFDRVYTIQSDVWSFGVLLWEIFSLGASPYPGVKIDEEFCRRLKEGTRMRAPDYTTPEMYQTMLDCWHGEPSQRPTFSELVEHLGNLLQANAQQDGKDYIVLPISETLSMEEDSGLSLPTSPVSCMEEEEVCDPKFHYDNTAGISQYLQNSKRKSRPVSVKTFEDIPLEEPEVKVIPDDNQTDSGMVLASEELKTLEDRTKLSPSFGGMVPSKSRESVASEGSNQTSGYQSGYHSDDTDTTVYSSEEAELLKLIEIGVQTGSTAQILQPDSGTTLSSPPV

SEQ ID NO: 230 - protein, 1338 aa, Homo sapiens
MVSYWDTGVLLCALLSCLLLTGSSSGSKLKDPELSLKGTQHIMQAGQTLHLQCRGEAAHKWSLPEMVSKESERLSITKSACGRNGKQFCSTLTLNTAQANHTGFYSCKYLAVPTSKKKETESAIYIFISDTGRPFVEMYSEIPEIIHMTEGRELVIPCRVTSPNITVTLKKFPLDTLIPDGKRIIWDSRKGFIISNATYKEIGLLTCEATVNGHLYKTNYLTHRQTNTIIDVQISTPRPVKLLRGHTLVLNCTATTPLNTRVQMTWSYPDEKNKRASVRRRIDQSNSHANIFYSVLTIDKMQNKDKGLYTCRVRSGPSFKSVNTSVHIYDKAFITVKHRKQQVLETVAGKRSYRLSMKVKAFPSPEVVWLKDGLPATEKSARYLTRGYSLIIKDVTEEDAGNYTILLSIKQSNVFKNLTATLIVNVKPQIYEKAVSSFPDPALYPLGSRQILTCTAYGIPQPTIKWFWHPCNHNHSEARCDFCSNNEESFILDADSNMGNRIESITQRMAIIEGKNKMASTLVVADSRISGIYICIASNKVGTVGRNISFYITDVPNGFHVNLEKMPTEGEDLKLSCTVNKFLYRDVTWILLRTVNNRTMHYSISKQKMAITKEHSITLNLTIMNVSLQDSGTYACRARNVYTGEEILQKKEITIRDQEAPYLLRNLSDHTVAISSSTTLDCHANGVPEPQITWFKNNHKIQQEPGIILGPGSSTLFIERVTEEDEGVYHCKATNQKGSVESSAYLTVQGTSDKSNLELITLTCTCVAATLFWLLLTLFIRKMKRSSSEIKTDYLSIIMDPDEVPLDEQCERLPYDASKWEFARERLKLGKSLGRGAFGKVVQASAFGIKKSPTCRTVAVKMLKEGATASEYKALMTELKILTHIGHHLNVVNLLGACTKQGGPLMVIVEYCKYGNLSNYLKSKRDLFFLNKDAALHMEPKKEKMEPGLEQGKKPRLDSVTSSESFASSGFQEDKSLSDVEEEEDSDGFYKEPITMEDLISYSFQVARGMEFLSSRKCIHRDLAARNILLSENNVVKICDFGLARDIYKNPDYVRKGDTRLPLKWMAPESIFDKIYSTKSDVWSYGVLLWEIFSLGGSPYPGVQMDEDFCSRLREGMRMRAPEYSTPEIYQIMLDCWHRDPKERPRFAELVEKLGDLLQANVQQDGKDYIPINAILTGNSGFTYSTPAFSEDFFKESISAPKFNSGSSDDVRYVNAFKFMSLERIKTFEELLPNATSMFDDYQGDSSTLLASPMLKRFTWTDSKPKASLKIDLRVTSKSKESGLSDVSRPSFCHSSCGHVSEGKRRFTYDHAELERKIACCSPPPDYNSVVLYSTPPI

SEQ ID NO: 231 - protein, 1363 aa, Homo sapiens
MQRGAALCLRLWLCLGLLDGLVSGYSMTPPTLNITEESHVIDTGDSLSISCRGQHPLEWAWPGAQEAPATGDKDSEDTGVVRDCEGTDARPYCKVLLLHEVHANDTGSYVCYYKYIKARIEGTTAASSYVFVRDFEQPFINKPDTLLVNRKDAMWVPCLVSIPGLNVTLRSQSSVLWPDGQEVVWDDRRGMLVSTPLLHDALYLQCETTWGDQDFLSNPFLVHITGNELYDIQLLPRKSLELLVGEKLVLNCTVWAEFNSGVTFDWDYPGKQAERGKWVPERRSQQTHTELSSILTIHNVSQHDLGSYVCKANNGIQRFRESTEVIVHENPFISVEWLKGPILEATAGDELVKLPVKLAAYPPPEFQWYKDGKALSGRHSPHALVLKEVTEASTGTYTLALWNSAAGLRRNISLELVVNVPPQIHEKEASSPSIYSRHSRQALTCTAYGVPLPLSIQWHWRPWTPCKMFAQRSLRRRQQQDLMPQCRDWRAVTTQDAVNPIESLDTWTEFVEGKNKTVSKLVIQNANVSAMYKCVVSNKVGQDERLIYFYVTTIPDGFTIESKPSEELLEGQPVLLSCQADSYKYEHLRWYRLNLSTLHDAHGNPLLLDCKNVHLFATPLAASLEEVAPGARHATLSLSIPRVAPEHEGHYVCEVQDRRSHDKHCHKKYLSVQALEAPRLTQNLTDLLVNVSDSLEMQCLVAGAHAPSIVWYKDERLLEEKSGVDLADSNQKLSIQRVREEDAGRYLCSVCNAKGCVNSSASVAVEGSEDKGSMEIVILVGTGVIAVFFWVLLLLIFCNMRRPAHADIKTGYLSIIMDPGEVPLEEQCEYLSYDASQWEFPRERLHLGRVLGYGAFGKVVEASAFGIHKGSSCDTVAVKMLKEGATASEHRALMSELKILIHIGNHLNVVNLLGACTKPQGPLMVIVEFCKYGNLSNFLRAKRDAFSPCAEKSPEQRGRFRAMVELARLDRRRPGSSDRVLFARFSKTEGGARRASPDQEAEDLWLSPLTMEDLVCYSFQVARGMEFLASRKCIHRDLAARNILLSESDVVKICDFGLARDIYKDPDYVRKGSARLPLKWMAPESIFDKVYTTQSDVWSFGVLLWEIFSLGASPYPGVQINEEFCQRLRDGTRMRAPELATPAIRRIMLNCWSGDPKARPAFSELVEILGDLLQGRGLQEEEEVCMAPRSSQSSEEGSFSQVSTMALHIAQADAEDSPPSLQRHSLAARYYNWVSFPGCLARGAETRGSSRMKTFEEFPMTPTTYKGSVDNQTDSGMVLASEEFEQIESRHRQESGFSCKGPGQNVAVTRAHPDSQGRRRRPERGARGGQVFYNSEYGELSEPSEEDHCSPSARVTFFTDNSY

SEQ ID NO: 232 - protein, 923 aa, Homo sapiens
MERGLPLLCAVLALVLAPAGAFRNDKCGDTIKIESPGYLTSPGYPHSYHPSEKCEWLIQAPDPYQRIMINFNPHFDLEDRDCKYDYVEVFDGENENGHFRGKFCGKIAPPPVVSSGPFLFIKFVSDYETHGAGFSIRYEIFKRGPECSQNYTTPSGVIKSPGFPEKYPNSLECTYIVFVPKMSEIILEFESFDLEPDSNPPGGMFCRYDRLEIWDGFPDVGPHIGRYCGQKTPGRIRSSSGILSMVFYTDSAIAKEGFSANYSVLQSSVSEDFKCMEALGMESGEIHSDQITASSQYSTNWSAERSRLNYPENGWTPGEDSYREWIQVDLGLLRFVTAVGTQGAISKETKKKYYVKTYKIDVSSNGEDWITIKEGNKPVLFQGNTNPTDVVVAVFPKPLITRFVRIKPATWETGISMRFEVYGCKITDYPCSGMLGMVSGLISDSQITSSNQGDRNWMPENIRLVTSRSGWALPPAPHSYINEWLQIDLGEEKIVRGIIIQGGKHRENKVFMRKFKIGYSNNGSDWKMIMDDSKRKAKSFEGNNNYDTPELRTFPALSTRFIRIYPERATHGGLGLRMELLGCEVEAPTAGPTTPNGNLVDECDDDQANCHSGTGDDFQLTGGTTVLATEKPTVIDSTIQSEFPTYGFNCEFGWGSHKTFCHWEHDNHVQLKWSVLTSKTGPIQDHTGDGNFIYSQADENQKGKVARLVSPVVYSQNSAHCMTFWYHMSGSHVGTLRVKLRYQKPEEYDQLVWMAIGHQGDHWKEGRVLLHKSLKLYQVIFEGEIGKGNLGGIAVDDISINNHISQEDCAKPADLDKKNPEIKIDETGSTPGYEGEGEGDKNISRKPGNVLKTLDPILITIIAMSALGVLLGAVCGVVLYCACWHNGMSERNLSALENYNFELVDGVKLKKDKLNTQSTYSEA

SEQ ID NO: 233 - protein, 931 aa, Homo sapiens
MDMFPLTWVFLALYFSRHQVRGQPDPPCGGRLNSKDAGYITSPGYPQDYPSHQNCEWIVYAPEPNQKIVLNFNPHFEIEKHDCKYDFIEIRDGDSESADLLGKHCGNIAPPTIISSGSMLYIRFTSDYARQGAGFSLRYEIFKTGSEDCSKNFTSPNGTIESPGFPEKYPHNLDCTFTILAKPKMEIILQFLIFDLEHDPLQVGEGDCKYDWLDIWDGIPHVGPLIGKYCGTKTPSELRSSTGILSLTFHTDMAVAKDGFSARYYLVHQEPLENFQCNVPLGMESGRIANEQISASSTYSDGRWTPQQSRLHGDDNGWTPNLDSNKEYLQVDLRFLTMLTAIATQGAISRETQNGYYVKSYKLEVSTNGEDWMVYRHGKNHKVFQANNDATEVVLNKLHAPLLTRFVRIRPQTWHSGIALRLELFGCRVTDAPCSNMLGMLSGLIADSQISASSTQEYLWSPSAARLVSSRSGWFPRIPQAQPGEEWLQVDLGTPKTVKGVIIQGARGGDSITAVEARAFVRKFKVSYSLNGKDWEYIQDPRTQQPKLFEGNMHYDTPDIRRFDPIPAQYVRVYPERWSPAGIGMRLEVLGCDWTDSKPTVETLGPTVKSEETTTPYPTEEEATECGENCSFEDDKDLQLPSGFNCNFDFLEEPCGWMYDHAKWLRTTWASSSSPNDRTFPDDRNFLRLQSDSQREGQYARLISPPVHLPRSPVCMEFQYQATGGRGVALQVVREASQESKLLWVIREDQGGEWKHGRIILPSYDMEYQIVFEGVIGKGRSGEIAIDDIRISTDVPLENCMEPISAFAGENFKVDIPEIHEREGYEDEIDDEYEVDWSNSSSATSGSGAPSTDKEKSWLYTLDPILITIIAMSSLGVLLGATCAGLLLYCTCSYSGLSSRSCTTLENYNFELYDGLKHKVKMNHQKCCSEA

SEQ ID NO: 234 - protein, 160 aa, Homo sapiens
MTDQQAEARSYLSEEMIAEFKAAFDMFDADGGGDISVKELGTVMRMLGQTPTKEELDAIIEEVDEDGSGTIDFEEFLVMMVRQMKEDAKGKSEEELAECFRIFDRNADGYIDPEELAEIFRASGEHVTDEEIESLMKDGDKNNDGRIDFDEFLKMMEGVQ

SEQ ID NO: 235 - protein, 182 aa, Homo sapiens
MGDEEKRNRAITARRQHLKSVMLQIAATELEKEESRREAEKQNYLAEHCPPLHIPGSMSEVQELCKQLHAKIDAAEEEKYDMEVRVQKTSKELEDMNQKLFDLRGKFKRPPLRRVRMSADAMLKALLGSKHKVCMDLRANLKQVKKEDTEKERDLRDVGDWRKNIEEKSGMEGRKKMFESES

SEQ ID NO: 236 - protein, 258 aa, Homo sapiens
MSDEEVEQVEEQYEEEEEAQEEEEVQEDTAEEDAEEEKPRPKLTAPKIPEGEKVDFDDIQKKRQNKDLMELQALIDSHFEARKKEEEELVALKERIEKRRAERAEQQRIRAEKERERQNRLAEEKARREEEDAKRRAEDDLKKKKALSSMGANYSSYLAKADQKRGKKQTAREMKKKILAERRKPLNIDHLGEDKLRDKAKELWETLHQLEIDKFEFGEKLKRQKYDITTLRSRIDQAQKHSKKAGTPAKGKVGGRWK

SEQ ID NO: 237 - protein, 153 aa, Homo sapiens
  MISC_FEATURE (79)..(79): S-carboxyamidomethylcysteine
  MISC_FEATURE (96)..(96): S-carboxyamidomethylcysteine
ADGSSDAAREPRPAPAPIRRRSSNYRAYATEPHAKKKSKISASRKLQLKTLLLQIAKQELEREAEERRGEKGRALSTRCQPLELTGLGFAELQDLCRQLHARVDKVDEERYDIEAKVTKNITEIADLTQKIFDLRGKFKRPTLRRVRISADAM

SEQ ID NO: 238 - protein, 402 aa, Homo sapiens [sequence omitted]

SEQ ID NO: 239 - protein, 415 aa, Homo sapiens
MEDLCVANTLFALNLFKHLAKASPTQNLFLSPWSISSTMAMVYMGSRGSTEDQMAKVLQFNEVGANAVTPMTPENFTSCGFMQQIQKGSYPDAILQAQAADKIHSSFRSLSSAINASTGNYLLESVNKLFGEKSASFREEYIRLCQKYYSSEPQAVDFLECAEEARKKINSWVKTQTKGKIPNLLPEGSVDGDTRMVLVNAVYFKGKWKTPFEKKLNGLYPFRVNSAQRTPVQMMYLREKLNIGYIEDLKAQILELPYAGDVSMFLLLPDEIADVSTGLELLESEITYDKLNKWTSKDKMAEDEVEVYIPQFKLEEHYELRSILRSMGMEDAFNKGRANFSGMSERNDLFLSEVFHQAMVDVNEEGTEAAAGTGGVMTGRTGHGGPQFVADHPFLFLIMHKITNCILFFGRFSSP

SEQ ID NO: 240 - protein, 368 aa, Homo sapiens
MVLEVSDHQVLNDAEVAALLENFSSSYDYGENESDSCCTSPPCPQDFSLNFDRAFLPALYSLLFLLGLLGNGAVAAVLLSRRTALSSTDTFLLHLAVADTLLVLTLPLWAVDAAVQWVFGSGLCKVAGALFNINFYAGALLLACISFDRYLNIVHATQLYRRGPPARVTLTCLAVWGLCLLFALPDFIFLSAHHDERLNATHCQYNFPQVGRTALRVLQLVAGFLLPLLVMAYCYAHILAVLLVSRGQRRLRAMRLVVVVVVAFALCWTPYHLVVLVDILMDLGALARNCGRESRVDVAKSVTSGLGYMHCCLNPLLYAFVGVKFRERMWMLLLRLGCPNQRGLQRQPSSSRRDSSWSETSEASYSGL

SEQ ID NO: 241 - protein, 91 aa, Homo sapiens
MKVSAAALAVILIATALCAPASASPYSSDTTPCCFAYIARPLPRAHIKEYFYTSGKCSNPAVVFVTRKNRQVCANPEKKWVREYINSLEMS

SEQ ID NO: 242 - protein, 98 aa, Homo sapiens
MNQTAILICCLIFLTLSGIQGVPLSRTVRCTCISISNQPVNPRSLEKLEIIPASQFCPRVEIIATMKKKGEKRCLNPESKAIKNLLKAVSKERSKRSP

SEQ ID NO: 243 - protein, 378 aa, Homo sapiens
MDLGKPMKSVLVVALLVIFQVCLCQDEVTDDYIGDNTTVDYTLFESLCSKKDVRNFKAWFLPIMYSIICFVGLLGNGLVVLTYIYFKRLKTMTDTYLLNLAVADILFLLTLPFWAYSAAKSWVFGVHFCKLIFAIYKMSFFSGMLLLLCISIDRYVAIVQAVSAHRHRARVLLISKLSCVGIWILATVLSIPELLYSDLQRSSSEQAMRCSLITEHVEAFITIQVAQMVIGFLVPLLAMSFCYLVIIRTLLQARNFERNKAIKVIIAVVVVFIVFQLPYNGVVLAQTVANFNITSSTCELSKQLNIAYDVTYSLACVRCCVNPFLYAFIGVKFRNDLFKLFKDLGCLSQEQLRQWSSCRHIRRSSMSVEAETTTTFSP

SEQ ID NO: 244 - protein, 397 aa, Homo sapiens
MAPISLSWLLRLATFCHLTVLLAGQHHGVTKCNITCSKMTSKIPVALLIHYQQNQASCGKRAIILETRQHRLFCADPKEQWVKDAMQHLDRQAAALTRNGGTFEKQIGEVKPRTTPAAGGMDESVVLEPEATGESSSLEPTPSSQEAQRALGTSPELPTGVTGSSGTRLPPTPKAQDGGPVGTELFRVPPVSTAATWQSSAPHQPGPSLWAEAKTSEAPSTQDPSTQASTASSPAPEENAPSEGQRVWGQGQSPRPENSLEREEMGPVPAHTDAFQDWGPGSMAHVSVVPVSSEGTPSREPVASGSWTPKAEEPIHATMDPQRLGVLITPVPDAQAATRRQAVGLLAFLGLLFCLGVAMFTYQSLQGCPRKMAGEMAEGLRYIPRSCGSNSYVLVPV

SEQ ID NO: 245 - protein, 97 aa, Homo sapiens
MKVSAALLWLLLIAAAFSPQGLAGPASVPTTCCFNLANRKIPLQRLESYRRITSGKCPQKAVIFKTKLAKDICADPKKKWVQDSMKYLDQKSPTPKP

SEQ ID NO: 246 - protein, 134 aa, Homo sapiens
MAQSLALSLLILVLAFGIPRTQGSDGGAQDCCLKYSQRKIPAKVVRSYRKQEPSLGCSIPAILFLPRKRSQAELCADPKELWVQQLMQHLDKTPSPQKPAQGCRKDRGASKTGKKGKGSKGCKRTERSQTPKGP

SEQ ID NO: 247 - protein, 114 aa, Homo sapiens
MRLLILALLGICSLTAYIVEGVGSEVSDKRTCVSLTTQRLPVSRIKTYTITEGSLRAVIFITKRGLKVCADPQATWVRDVVRSMDRKSNTRNNMIQTKPTGTQQSTNTAVTLTG

SEQ ID NO: 248 - protein, 96 aa, Homo sapiens
MCCTKSLLLAALMSVLLLHLCGESEAASNFDCCLGYTDRILHPKFIVGFTRQLANEGCDINAIIFHTKKKLSVCANPKQTWVKYIVRLLSKKVKNM

SEQ ID NO: 249 - protein, 98 aa, Homo sapiens
MALLLALSLLVLWTSPAPTLSGTNDAEDCCLSVTQKPIPGYIVRNFHYLLIKDGCRVPAVVFTTLRGRQLCAPPDQPWVERIIQRLQRTSAKMKRRSS

SEQ ID NO: 250 - protein, 353 aa, Homo sapiens
MELTELLLVVMLLLTARLTLSSPAPPACDLRVLSKLLRDSHVLHSRLSQCPEVHPLPTPVLLPAVDFSLGEWKTQMEETKAQDILGAVTLLLEGVMAARGQLGPTCLSSLLGQLSGQVRLLLGALQSLLGTQLPPQGRTTAHKDPNAIFLSFQHLLRGKVRFLMLVGGSTLCVRRAPPTTAVPSRTSLVLTLNELPNRTSGLLETNFTASARTTGSGLLKWQQGFRAKIPGLLNQTSRSLDQIPGYLNRIHELLNGTRGLFPGPSRRTLGAPDISSGTSDTGSLPPNLQPGYSPSPTHPPTGQYTLFPLPPTLPTPVVQLHPLLPDPSAPTPTPTSPLLNTSYTHSQNLSQEG

SEQ ID NO: 251 - protein, 273 aa, Homo sapiens
MKKTQTWILTCIYLQLLLFNPLVKTEGICRNRVTNNVKDVTKLVANLPKDYMITLKYVPGMDVLPSHCWISEMVVQLSDSLTDLLDKFSNISEGLSNYSIIDKLVNIVDDLVECVKENSSKDLKKSFKSPEPRLFTPEEFFRIFNRSIDAFKDFVVASETSDCVVSSTLSPEKDSRVSVTKPFMLPPVAASSLRNDSSSSNRKAKNPPGDSSLHWAAMALPALFSLIIGFAFGALYWKKRQPSLTRAVENIQINEEDNEISMLQEKEREFQEV

SEQ ID NO: 252 - protein, 149 aa, Homo sapiens
MPVMRLFPCFLQLLAGLALPAVPPQQWALSAGNGSSEVEVVPFQEVWGRSYCRALERLVDVVSEYPSEVEHMFSPSCVSLLRCTGCCGDENLHCVPVETANVTMQLLKIRSGDRPSYVELTFSQHVRCECRPLREKMKPERCGDAVPRR

SEQ ID NO: 253 - protein, 170 aa, Homo sapiens
MPVMRLFPCFLQLLAGLALPAVPPQQWALSAGNGSSEVEVVPFQEVWGRSYCRALERLVDVVSEYPSEVEHMFSPSCVSLLRCTGCCGDENLHCVPVETANVTMQLLKIRSGDRPSYVELTFSQHVRCECRPLREKMKPERRRPKGRGKRRREKQRPTDCHLCGDAVPRR

SEQ ID NO: 254 - protein, 241 aa, Homo sapiens
MSMLFYTLITAFLIGIQAEPHSESNVPAGHTIPQAHWTKLQHSLDTALRRARSAPAAAIAARVAGQTRNITVDPRLFKKRRLRSPRVLFSTQPPREAADTQDLDFEVGGAAPFNRTHRSKRSSSHPIFHRGEFSVCDSVSVWVGDKTTATDIKGKEVMVLGEVNINNSVFKQYFFETKCRDPNPVDSGCRGIDSKHWNSYCTTTHTFVKALTMDGKQAAWRFIRIDTACVCVLSRKAVRRA

SEQ ID NO: 255 - protein, 257 aa, Homo sapiens
MSILFYVIFLAYLRGIQGNNMDQRSLPEDSLNSLIIKLIQADILKNKLSKQMVDVKENYQSTLPKAEAPREPERGGPAKSAFQPVIAMDTELLRQQRRYNSPRVLLSDSTPLEPPPLYLMEDYVGSPVVANRTSRRKRYAEHKSHRGEYSVCDSESLWVTDKSSAIDIRGHQVTVLGEIKTGNSPVKQYFYETRCKEARPVKNGCRGIDDKHWNSQCKTSQTYVRALTSENNKLVGWRWIRIDTSCVCALSRKIGRT

SEQ ID NO: 256 - protein, 210 aa, Homo sapiens
MLPLPSCSLPILLLFLLPSVPIESQPPPSTLPPFLAPEWDLLSPRVVLSRGAPAGPPLLFLLEAGAFRESAGAPANRSRRGVSETAPASRRGELAVCDAVSGWVTDRRTAVDLRGREVEVLGEVPAAGGSPLRQYFFETRCKADNAEEGGPGAGGGGCRGVDRRHWVSECKAKQSYVRALTADAQGRVGWRWIRIDTACVCTLLSRTGRA

SEQ ID NO: 257 - protein, 211 aa, Homo sapiens [sequence omitted]

SEQ ID NO: 258 - protein, 241 aa, Homo sapiens
MNRCWALFLSLCCYLRLVSAEGDPIPEELYEMLSDHSIRSFDDLQRLLHGDPGEEDGAELDLNMTRSHSGGELESLARGRRSLGSLTIAEPAMIAECKTRTEVFEISRRLIDRTNANFLVWPPCVEVQRCSGCCNNRNVQCRPTQVQLRPVQVRKIEIVRKKPIFKKATVTLEDHLACKCETVAAARPVTRSPGGSQEQRAKTPQTRVTIRTVRVRRPPKGKHRKFKHTHDKTALKETLGA

SEQ ID NO: 259 - protein, 89 aa, Homo sapiens
MNAKVVVVLVLVLTALCLSDGKPVSLSYRCPCRFFESHVARANVKHLKILNTPNCALQIVARLKNNNRQVCIDPKLKWIQEYLEKALNK

SEQ ID NO: 260 - protein, 93 aa, Homo sapiens
MNAKVVVVLVLVLTALCLSDGKPVSLSYRCPCRFFESHVARANVKHLKILNTPNCALQIVARLKNNNRQVCIDPKLKWIQEYLEKALNKRFKM

SEQ ID NO: 261 - protein, 94 aa, Homo sapiens
MAPLKMLALVTLLLGASLQHIHAARGTNVGRECCLEYFKGAIPLRKLKTWYQTSEDCSRDAIVFVTVQGRAICSDPNNKRVKNAVKYLQSLERS

SEQ ID NO: 262 - protein, 227 aa, Homo sapiens
MNIKGSPWKGSLLLLLVSNLLLCQSVAPLPICPGGAARCQVTLRDLFDRAVVLSHYIHNLSSEMFSEFDKRYTHGRGFITKAINSCHTSSLATPEDKEQAQQMNQKDFLSLIVSILRSWNEPLYHLVTEVRGMQEAPEAILSKAVEIEEQTKRLLEGMELIVSQVHPETKENEIYPVWSGLPSLQMADEESRLSAYYNLLHCLRRDSHKIDNYLKLLKCRIIHNNNC

SEQ ID NO: 263 - protein, 116 aa, Homo sapiens
MDYYRKYAAIFLVTLSVFLHVLHSAPDVQDCPECTLQENPFFSQPGAPILQCMGCCFSRAYPTPLRSKKTMLVQKNVTSESTCCVAKSYNRVTVMGGFKVENHTACHCSTCYYHKS

SEQ ID NO: 264 - protein, 129 aa, Homo sapiens
MKTLQFFFLFCCWKAICCNSCELTNITIAIEKEECRFCISINTTWCAGYCYTRDLVYKDPARPKIQKTCTFKELVYETVRVPGCAHHADSLYTYPVATQCHCGKCDSDSTDCTVRGLGPSYCSFGEMKE

SEQ ID NO: 265 - protein, 125 aa, Homo sapiens
MAGPSLACCLLGLLALTSACYIQNCPLGGKRAAPDLDVRKCLPCGPGGKGRCFGPNICCAEELGCFVGTAEALRCQEENYLPSPCQSGQKACGSGGRCAVLGLCCSPDGCHADPACDAEATFSQR

SEQ ID NO: 266 - protein, 164 aa, Homo sapiens
MPDTMLPACFLGLLAFSSACYFQNCPRGGKRAMSDLELRQCLPCGPGGKGRCFGPSICCADELGCFVGTAEALRCQEENYLPSPCQSGQKACGSGGRCAAFGVCCNDESCVTEPECREGFHRRARASDRSNATQLDGPAGALLLRLVQLAGAPEPFEPAQPDAY

SEQ ID NO: 267 - protein, 269 aa, Homo sapiens
MAEVPELASEMMAYYSGNEDDLFFEADGPKQMKCSFQDLDLCPLDGGIQLRISDHHYSKGFRQAASVVVAMDKLRKMLVPCPQTFQENDLSTFFPFIFEEEPIFFDTWDNEAYVHDAPVRSLNCTLRDSQQKSLVMSGPYELKALHLQGQDMEQQVVFSMSFVQGEESNDKIPVALGLKEKNLYLSCVLKDDKPTLQLESVDPKNYPKKKMEKRFVFNKIEINNKLEFESAQFPNWYISTSQAENMPVFLGGTKGGQDITDFTMQFVSS

SEQ ID NO: 268 - protein, 153 aa, Homo sapiens [sequence omitted]

SEQ ID NO: 269 - protein, 271 aa, Homo sapiens
MAKVPDMFEDLKNCYSENEEDSSSIDHLSLNQKSFYHVSYGPLHEGCMDQSVSLSISETSKTSKLTFKESMVVVATNGKVLKKRRLSLSQSITDDDLEAIANDSEEEIIKPRSAPFSFLSNVKYNFMRIIKYEFILNDALNQSIIRANDQYLTAAALHNLDEAVKFDMGAYKSSKDDAKITVILRISKTQLYVTAQDEDQPVLLKEMPEIPKTITGSETNLLFFWETHGTKNYFTSVAHPNLFIATKQDYWVCLAGGPPSITDFQILENQA

SEQ ID NO: 270 - protein, 212 aa, Homo sapiens
MNSFSTSAFGPVAFSLGLLLVLPAAFPAPVPPGEDSKDVAAPHRQPLTSSERIDKQIRYILDGISALRKETCNKSNMCESSKEALAENNLNLPKMAEKDGCFQSGFNEETCLVKIITGLLEFEVYLEYLQNRFESSEEQARAVQMSTKVLIQFLQKKAKNLDAITTPDPTTNASLLTKLQAQNQWLQDMTTHLILRSFKEFLQSSLRALRQM

SEQ ID NO: 271 - protein, 146 aa, Homo sapiens [sequence omitted]

SEQ ID NO: 272 - protein, 178 aa, Homo sapiens
MHSSALLCCLVLLTGVRASPGQGTQSENSCTHFPGNLPNMLRDLRDAFSRVKTFFQMKDQLDNLLLKESLLEDFKGYLGCQALSEMIQFYLEEVMPQAENQDPDIKAHVNSLGENLKTLRLRLRRCHRFLPCENKSKAVEQVKNAFNKLQEKGIYKAMSEFDIFINYIEAYMTMKIRN

SEQ ID NO: 273 - protein, 160 aa, Homo sapiens
SPGQGTQSENSCTHFPGNLPNMLRDLRDAFSRVKTFFQMKDQLDNLLLKESLLEDFKGYLGCQALSEMIQFYLEEVMPQAENQDPDIKAHVNSLGENLKTLRLRLRRCHRFLPCENKSKAVEQVKNAFNKLQEKGIYKAMSEFDIFINYIEAYMTMKIRN

SEQ ID NO: 274 - protein, 269 aa, Homo sapiens; identical to SEQ ID NO: 267

SEQ ID NO: 275 - protein, 350 aa, Homo sapiens [sequence omitted]

SEQ ID NO: 276 - protein, 177 aa, Homo sapiens
MFHVSFRYIFGLPPLILVLLPVASSDCDIEGKDGKQYESVLMVSIDQLLDSMKEIGSNCLNNEFNFFKRHICDANKEGMFLFRAARKLRQFLKMNSTGDFDLHLLKVSEGTTILLNCTGQVKGRKPAALGEAQPTKSLEENKSLKEQKKLNDLCFLKRLLQEIKTCWNKILMGTKEH

SEQ ID NO: 277 - protein, 328 aa, Homo sapiens
MCHQQLVISWFSLVFLASPLVAIWELKKDVYVVELDWYPDAPGEMVVLTCDTPEEDGITWTLDQSSEVLGSGKTLTIQVKEFGDAGQYTCHKGGEVLSHSLLLLHKKEDGIWSTDILKDQKEPKNKTFLRCEAKNYSGRFTCWWLTTISTDLTFSVKSSRGSSDPQGVTCGAATLSAERVRGDNKEYEYSVECQEDSACPAAEESLPIEVMVDAVHKLKYENYTSSFFIRDIIKPDPPKNLQLKPLKNSRQVEVSWEYPDTWSTPHSYFSLTFCVQVQGKSKREKKDRVFTDKTSATVICRKNASISVRAQDRYYSSSWSEWASVPCS

SEQ ID NO: 278 - protein, 470 aa, Homo sapiens
MGKPWLRALQLLLLLGASWARAGAPRCTYTFVLPPQKFTGAVCWSGPASTRATPEAANASELAALRMRVGRHEELLRELQRLAAADGAVAGEVRALRKESRGLSARLGQLRAQLQHEAGPGAGPGADLGAEPAAALALLGERVLNASAEAQRAAARFHQLDVKFRELAQLVTQQSSLIARLERLCPGGAGGQQQVLPPPPLVPVVPVRLVGSTSDTSRMLDPAPEPQRDQTQRQQEPMASPMPAGHPAVPTKPVGPWQDCAEARQAGHEQSGVYELRVGRHVVSVWCEQQLEGGGWTVIQRRQDGSVNFFTTWQHYKAGFGRPDGEYWLGLEPVYQLTSRGDHELLVLLEDWGGRGARAHYDGFSLEPESDHYRLRLGQYHGDAGDSLSWHNDKPFSTVDRDRDSYSGNCALYQRGGWWYHACAHSNLNGVWHHGGHYRSRYQDGVYWAEFRGGAYSLRKAAMLIRPLKL

SEQ ID NO: 279 - protein, 144 aa, Homo sapiens
MLLAMVLTSALLLCSVAGQGCPTLAGILDINFLINKMQEDPASKCHCSANVTSCLCLGIPSDNCTRPCFSERLSQMTNTTMQTRYPLIFSRVKKSVEVLKNNKCPYFSCEQPCNQTTAGNALTFLKSLLEIFQKEKMRGMRGKI

SEQ ID NO: 280 - protein, 152 aa, Homo sapiens
MSRLPVLLLLQLLVRPGLQAPMTQTTPLKTSWVNCSNMIDEIITHLKQPPLPLLDFNNLNGEDQDILMENNLRRPNLEAFNRAVKSLQNASAIESILKNLLPCLPLATAAPTRHPIHIKDGDWNEFRRKLTFYLKTLENAQAQQTTLSLAIF

SEQ ID NO: 281 - protein, 134 aa, Homo sapiens
MRMLLHLSLLALGAAYVYAIPTEIPTSALVKETLALLSTHRTLLIANETLRIPVPVHKNHQLCTEEIFQGIGTLESQTVQGGTVERLFKNLSLIKKYIDGQKKKCGEERRRVNQFLDYLQEFLGVMNTEWIIES

SEQ ID NO: 282 - protein, 1332 aa, Homo sapiens
MESHSRAGKSRKSAKFRSISRSLMLCNAKTSDDGSSPDEKYPDPFEISLAQGKEGIFHSSVQLADTSEAGPSSVPDLALASEAAQLQAAGNDRGKTCRRIFFMKESSTASSREKPGKLEAQSSNFLFPKACHQRARSNSTSVNPYCTREIDFPMTKKSAAPTDRQPYSLCSNRKSLSQQLDCPAGKAAGTSRPTRSLSTAQLVQPSGGLQASVISNIVLMKGQAKGLGFSIVGGKDSIYGPIGIYVKTIFAGGAAAADGRLQEGDEILELNGESMAGLTHQDALQKFKQAKKGLLTLTVRTRLTAPPSLCSHLSPPLCRSLSSSTCITKDSSSFALESPSAPISTAKPNYRIMVEVSLQKEAGVGLGIGLCSVPYFQCISGIFVHTLSPGSVAHLDGRLRCGDEIVEISDSPVHCLTLNEVYTILSHCDPGPVPIIVSRHPDPQVSEQQLKEAVAQAVENTKFGKERHQWSLEGVKRLESSWHGRPTLEKEREKNSAPPHRRAQKVMIRSSSDSSYMSGSPGGSPGSGSAEKPSSDVDISTHSPSLPLAREPVVLSIASSRLPQESPPLPESRDSHPPLRLKKSFEILVRKPMSSKPKPPPRKYFKSDSDPQKSLEERENSSCSSGHTPPTCGQEARELLPLLLPQEDTAGRSPSASAGCPGPGIGPQTKSSTEGEPGWRRASPVTQTSPIKHPLLKRQARMDYSFDTTAEDPWVRISDCIKNLFSPIMSENHGHMPLQPNASLNEEEGTQGHPDGTPPKLDTANGTPKVYKSADSSTVKKGPPVAPKPAWFRQSLKGLRNRASDPRGLPDPALSTQPAPASREHLGSHIRASSSSSSIRQRISSFETFGSSQLPDKGAQRLSLQPSSGEAAKPLGKHEEGRFSGLLGRGAAPTLVPQQPEQVLSSGSPAASEARDPGVSESPPPGRQPNQKTLPPGPDPLLRLLSTQAEESQGPVLKMPSQRARSFPLTRSQSCETKLLDEKTSKLYSISSQVSSAVMKSLLCLPSSISCAQTPCIPKEGASPTSSSNEDSAANGSAETSALDTGFSLNLSELREYTEGLTEAKEDDDGDHSSLQSGQSVISLLSSEELKKLIEEVKVLDEATLKQLDGIHVTILHKEEGAGLGFSLAGGADLENKVITVHRVFPNGLASQEGTIQKGNEVLSINGKSLKGTTHHDALAILRQAREPRQAVIVTRKLTPEAMPDLNSSTDSAASASAASDVSVESTAEATVCTVTLEKMSAGLGFSLEGGKGSLHGDKPLTINRIFKGAASEQSETVQPGDEILQLGGTAMQGLTRFEAWNIIKALPDGPVTIVIRRKSLQSKETTAAGDS

SEQ ID NO: 283 - protein, 193 aa, Homo sapiens
MAAEPVEDNCINFVAMKFIDNTLYFIAEDDENLESDYFGKLESKLSVIRNLNDQVLFIDQGNRPLFEDMTDSDCRDNAPRTIFIISMYKDSQPRGMAVTISVKCEKISTLSCENKIISFKEMNPPDNIKDTKSDIIFFQRSVPGHDNKMQFESSSYEGYFLACEKERDLFKLILKKEDELGDRSIMFTVQNED

SEQ ID NO: 284 - protein, 219 aa, Homo sapiens
MCPARSLLLVATLVLLDHLSLARNLPVATPDPGMFPCLHHSQNLLRAVSNMLQKARQTLEFYPCTSEEIDHEDITKDKTSTVEACLPLELTKNESCLNSRETSFITNGSCLASRKTSFMMALCLSSIYEDLKMYQVEFKTMNAKLLMDPKRQIFLDQNMLAVIDELMQALNFNSETVPQKSSLEEPDFYKTKIKLCILLHAFRIRAVTIDRVMSYLNAS

SEQ ID NO: 285 - protein, 162 aa, Homo sapiens
MRISKPHLRSISIQCYLCLLLNSHFLTEAGIHVFILGCFSAGLPKTEANWVNVISDLKKIEDLIQSMHIDATLYTESDVHPSCKVTAMKCFLLELQVISLESGDASIHDTVENLIILANNSLSSNGNVTESGCKECEELEEKNIKEFLQSFVHIVQMFINTS

SEQ ID NO: 286 - protein, 153 aa, Homo sapiens [sequence omitted]

SEQ ID NO: 287 - protein, 154 aa, Homo sapiens
MVLSGALCFRMKDSALKVLYLHNNQLLAGGLHAGKVIKGEEISWPNRWLDASLSPVILGVQGGSQCLSCGVGQEPTLTLEPVNIMELYLGAKESKSFTFYRRDMGLTSSFESAAYPGWFLCTVPEADQPVRLTQLPENGGWNAPITDFYFQQCD

SEQ ID NO: 288 - protein, 199 aa, Homo sapiens
MNCVCRLVLVVLSLWPDTAVAPGPPPGPPRVSPDPRAELDSTVLLTRSLLADTRQLAAQLRDKFPADGDHNLDSLPTLAMSAGALGALQLPGVLTRLRADLLSYLRHVQWLRRAGGSSLKTLEPELGTLQARLDRLLRRLQLLMSRLALPQPPPDPPAPPLAPPSSAWGGIRAAHAILGGLHLTLDWAVRGLLLLKTRL

SEQ ID NO: 289 - protein, 546 aa, Homo sapiens
MKNQDKKNGAAKQSNPKSSPGQPEAGPEGAQERPSQAAPAVEAEGPGSSQAPRKPEGAQARTAQSGALRDVSEELSRQLEDILSTYCVDNNQGGPGEDGAQGEPAEPEDAEKSRTYVARNGEPEPTPVVNGEKEPSKGDPNTEEIRQSDEVGDRDHRRPQEKKKAKGLGKEITLLMQTLNTLSTPEEKLAALCKKYAELLEEHRNSQKQMKLLQKKQSQLVQEKDHLRGEHSKAVLARSKLESLCRELQRHNRSLKEEGVQRAREEEEKRKEVTSHFQVTLNDIQLQMEQHNERNSKLRQENMELAERLKKLIEQYELREEHIDKVFKHKDLQQQLVDAKLQQAQEMLKEAEERHQREKDFLLKEAVESQRMCELMKQQETHLKQQLALYTEKFEEFQNTLSKSSEVFTTFKQEMEKMTKKIKKLEKETTMYRSRWESSNKALLEMAEEKTVRDKELEGLQVKIQRLEKLCRALQTERNDLNKRVQDLSAGGQGSLTDSGPERRPEGPGAQAPSSPRVTEAPCYPGAPSTEASGQTGPQEPTSARA

SEQ ID NO: 290 - protein, 866 aa, Homo sapiens
MGAARSPPSAVPGPLLGLLLLLLGVLAPGGASLRLLDHRALVCSQPGLNCTVKNSTCLDDSWIHPRNLTPSSPKDLQIQLHFAHTQQGDLFPVAHIEWTLQTDASILYLEGAELSVLQLNTNERLCVRFEFLSKLRHHHRRWRFTFSHFVVDPDQEYEVTVHHLPKPIPDGDPNHQSKNFLVPDCEHARMKVTTPCMSSGSLWDPNITVETLEAHQLRVSFTLWNESTHYQILLTSFPHMENHSCFEHMHHIPAPRPEEFHQRSNVTLTLRNLKGCCRHQVQIQPFFSSCLNDCLRHSATVSCPEMPDTPEPIPDYMPLWVYWFITGISILLVGSVILLIVCMTWRLAGPGSEKYSDDTKYTDGLPAADLIPPPLKPRKVWIIYSADHPLYVDVVLKFAQFLLTACGTEVALDLLEEQAISEAGVMTWVGRQKQEMVESNSKIIVLCSRGTRAKWQALLGRGAPVRLRCDHGKPVGDLFTAAMNMILPDFKRPACFGTYVVCYFSEVSCDGDVPDLFGAAPRYPLMDRFEEVYFRIQDLEMFQPGRMHRVGELSGDNYLRSPGGRQLRAALDRFRDWQVRCPDWFECENLYSADDQDAPSLDEEVFEEPLLPPGTGIVKRAPLVREPGSQACLAIDPLVGEEGGAAVAKLEPHLQPRGQPAPQPLHTLVLAAEEGALVAAVEPGPLADGAAVRLALAGEGEACPLLGSPGAGRNSVLFLPVDPEDSPLGSSTPMASPDLLPEDVREHLEGLMLSLFEQSLSCQAQGGCSRPAMVLTDPHTPYEEEQRQSVQSDQGYISRSSPQPPEGLTEMEEEEEEEQDPGKPALPLSPEDLESLRSLQRQLLFRQLQKNSGWDTMGSESEGPSA

SEQ ID NO: 291 - protein, 155 aa, Homo sapiens
MTPGKTSLVSLLLLLSLEAIVKAGITIPRNPGCPNSEDKNFPRTVMVNLNIHNRNTNTNPKRSSDYYNRSTSPWNLHRNEDPERYPSVIWEAKCRHLGCINADGNVDYHMNSVPIQQEILVLRREPPHCPNSFRLEKILVSVGCTCVTPIVHHVA

SEQ ID NO: 292 - protein, 177 aa, Homo sapiens
MKLQCVSLWLLGTILILCSVDNHGLRRCLISTDMHHIEESFQEIKRAIQAKDTFPNVTILSTLETLQIIKPLDVCCVTKNLLAFYVDRVFKDHQEPNPKILRKISSIANSFLYMQKTLRQCQEQRQCHCRQEATNATRVIHDNYDQLEVHAAAIKSLGELDVFLAWINKNHEVMFSA

SEQ ID NO: 293 - protein, 155 aa, Homo sapiens
MERIVICLMVIFLGTLVHKSSSQGQDRHMIRMRQLIDIVDQLKNYVNDLVPEFLPAPEDVETNCEWSAFSCFQKAQLKSANTGNNERIINVSIKKLKRKPPSTNAGRRQKHRLTCPSCDSYEKKPPKEFLERFKSLLQKMIHQHLSSRTHGSEDS

SEQ ID NO: 294 - protein, 350 aa, Homo sapiens
MSNITDPQMWDFDDLNFTGMPPADEDYSPCMLETETLNKYVVIIAYALVFLLSLLGNSLVMLVILYSRVGRSVTDVYLLNLALADLLFALTLPIWAASKVNGWIFGTFLCKVVSLLKEVNFYSGILLLACISVDRYLAIVHATRTLTQKRHLVKFVCLGCWGLSMNLSLPFFLFRQAYHPNNSSPVCYEVLGNDTAKWRMVLRILPHTFGFIVPLFVMLFCYGFTLRTLFKAHMGQKHRAMRVIFAVVLIFLLCWLPYNLVLLADTLMRTQVIQESCERRNNIGRALDATEILGFLHSCLNPIIYAFIGQNFRHGFLKILAMHGLVSKEFLARHRVTSYTSSSVNVSSNL

SEQ ID NO: 295 - protein, 360 aa, Homo sapiens
MEDFNMESDSFEDFWKGEDLSNYSYSSTLPPFLLDAAPCEPESLEINKYFVVIIYALVFLLSLLGNSLVMLVILYSRVGRSVTDVYLLNLALADLLFALTLPIWAASKVNGWIFGTFLCKVVSLLKEVNFYSGILLLACISVDRYLAIVHATRTLTQKRYLVKFICLSIWGLSLLLALPVLLFRRTVYSSNVSPACYEDMGNNTANWRMLLRILPQSFGFIVPLLIMLFCYGFTLRTLFKAHMGQKHRAMRVIFAVVLIFLLCWLPYNLVLLADTLMRTQVIQETCERRNHIDRALDATEILGILHSCLNPLIYAFIGQKFRHGLLKILAIHGLISKDSLPKDSRPSFVGSSSGHTSTTL

SEQ ID NO: 296 - protein, 398 aa, Homo sapiens
MLRLYVLVMGVSAFTLQPAAHTGAARSCRFRGRHYKREFRLEGEPVALRCPQVPYWLWASVSPRINLTWHKNDSARTVPGEEETRMWAQDGALWLLPALQEDSGTYVCTTRNASYCDKMSIELRVFENTDAFLPFISYPQILTLSTSGVLVCPDLSEFTRDKTDVKIQWYKDSLLLDKDNEKFLSVRGTTHLLVHDVALEDAGYYRCVLTFAHEGQQYNITRSIELRIKKKKEETIPVIISPLKTISASLGSRLTIPCKVFLGTGTPLTTMLWWTANDTHIESAYPGGRVTEGPRQEYSENNENYIEVPLIFDPVTREDLHMDFKCVVHNTLSFQTLRTTVKEASSTFSWGIVLAPLSLAFLVLGGIWMHRRCKHRTGKADGLTVLWPHHQDFQSYPK

SEQ ID NO: 297 - protein, 422 aa, Homo sapiens
MSSSCSGLSRVLVAVATALVSASSPCPQAWGPPGVQYGQPGRSVKLCCPGVTAGDPVSWFRDGEPKLLQGPDSGLGHELVLAQADSTDEGTYICQTLDGALGGTVTLQLGYPPARPVVSCQAADYENFSCTWSPSQISGLPTRYLTSYRKKTVLGADSQRRSPSTGPWPCPQDPLGAARCVVHGAEFWSQYRINVTEVNPLGASTRLLDVSLQSILRPDPPQGLRVESVPGYPRRLRASWTYPASWPCQPHFLLKFRLQYRPAQHPAWSTVEPAGLEEVITDAVAGLPHAVRVSARDFLDAGTWSTWSPEAWGTPSTGTIPKEIPAWGQLHTQPEVEPQVDSPAPPRPSLQPHPRLLDHRDSVEQVAVLASLGILSFLGLVAGALALGLWLRLRRGGKDGSPKPGFLASVIPVDRRPGAPNL

SEQ ID NO: 298 - protein, 427 aa, Homo sapiens
MEWPARLCGLWALLLCAGGGGGGGGAAPTETQPPVTNLSVSVENLCTVIWTWNPPEGASSNCSLWYFSHFGDKQDKKIAPETRRSIEVPLNERICLQVGSQCSTNESEKPSILVEKCISPPEGDPESAVTELQCIWHNLSYMKCSWLPGRNTSPDTNYTLYYWHRSLEKIHQCENIFREGQYFGCSFDLTKVKDSSFEQHSVQIMVKDNAGKIKPSFNIVPLTSRVKPDPPHIKNLSFHNDDLYVQWENPQNFISRCLFYEVEVNNSQTETHNVFYVQEAKCENPEFERNVENTSCFMVPGVLPDTLNTVRIRVKTNKLCYEDDKLWSNWSQEMSIGKKRNSTLYITMLLIVPVIVAGAIIVLLLYLKRLKIIIFPPIPDPGKIFKEMFGDQNDDTLHWKKYDIYEKQTKEETDSVVLIENLKKASQ

SEQ ID NO: 299 - protein, 380 aa, Homo sapiens
MAFVCLAIGCLYTFLISTTFGCTSSSDTEIKVNPPQDFEIVDPGYLGYLYLQWQPPLSLDHFKECTVEYELKYRNIGSETWKTIITKNLHYKDGFDLNKGIEAKIHTLLPWQCTNGSEVQSSWAETTYWISPQGIPETKVQDMDCVYYNWQYLLCSWKPGIGVLLDTNYNLFYWYEGLDHALQCVDYIKADGQNIGCRFPYLEASDYKDFYICVNGSSENKPIRSSYFTFQLQNIVKPLPPVYLTFTRESSCEIKLKWSIPLGPIPARCFDYEIEIREDDTTLVTATVENETYTLKTTNETRQLCFVVRSKVNIYCSDDGIWSEWSDKQCWEGEDLSKKTLLRFWLPFGFILILVIFVTGLLLRKPNTYPKMIPEFFCDT

SEQ ID NO: 300 - protein, 825 aa, Homo sapiens
MGWLCSGLLFPVSCLVLLQVASSGNMKVLQEPTCVSDYMSISTCEWKMNGPTNCSTELRLLYQLVFLLSEAHTCIPENNGGAGCVCHLLMDDVVSADNYTLDLWAGQQLLWKGSFKPSEHVKPRAPGNLTVHTNVSDTLLLTWSNPYPPDNYLYNHLTYAVNIWSENDPADFRIYNVTYLEPSLRIAASTLKSGISYRARVRAWAQCYNTTWSEWSPSTKWHNSYREPFEQHLLLGVSVSCIVILAVCLLCYVSITKIKKEWWDQIPNPARSRLVAIIIQDAQGSQWEKRSRGQEPAKCPHWKNCLTKLLPCFLEHNMKRDEDPHKAAKEMPFQGSGKSAWCPVEISKTVLWPESISVVRCVELFEAPVECEEEEEVEEEKGSFCASPESSRDDFQEGREGIVARLTESLFLDLLGEENGGFCQQDMGESCLLPPSGSTSAHMPWDEFPSAGPKEAPPWGKEQPLHLEPSPPASPTQSPDNLTCTETPLVIAGNPAYRSFSNSLSQSPCPRELGPDPLLARHLEEVEPEMPCVPQLSEPTTVPQPEPETWEQILRRNVLQHGAAAAPVSAPTSGYQEFVHAVEQGGTQASAVVGLGPPGEAGYKAFSSLLASSAVSPEKCGFGASSGEEGYKPFQDLIPGCPGDPAPVPVPLFTFGLDREPPRSPQSSHLPSSSPEHLGLEPGEKVEDMPKPPLPQEQATDPLVDSLGSGIVYSALTCHLCGHLKQCHGQEDGGQTPVMASPCCGCCCGDRSSPPTTPLRAPDPSPGGVPLEASLCPASLAPSGISEKSKSSSSFHPAPGNAQSSSQTPKIVNFVSVGPTYMRVS

SEQ ID NO: 301 - protein, 862 aa, Homo sapiens
MAHTFRGCSLAFMFIITWLLIKAKIDACKRGDVTVKPSHVILLGSTVNITCSLKPRQGCFHYSRRNKLILYKFDRRINFHHGHSLNSQVTGLPLGTTLFVCKLACINSDEIQICGAEIFVGVAPEQPQNLSCIQKGEQGTVACTWERGRDTHLYTEYTLQLSGPKNLTWQKQCKDIYCDYLDFGINLTPESPESNFTAKVTAVNSLGSSSSLPSTFTFLDIVRPLPPWDIRIKFQKASVSRCTLYWRDEGLVLLNRLRYRPSNSRLWNMVNVTKAKGRHDLLDLKPFTEYEFQISSKLHLYKGSWSDWSESLRAQTPEEEPTGMLDVWYMKRHIDYSRQQISLFWKNLSVSEARGKILHYQVTLQELTGGKAMTQNITGHTSWTTVIPRTGNWAVAVSAANSKGSSLPTRINIMNLCEAGLLAPRQVSANSEGMDNILVTWQPPRKDPSAVQEYVVEWRELHPGGDTQVPLNWLRSRPYNVSALISENIKSYICYEIRVYALSGDQGGCSSILGNSKHKAPLSGPHINAITEEKGSILISWNSIPVQEQMGCLLHYRIYWKERDSNSQPQLCEIPYRVSQNSHPINSLQPRVTYVLWMTALTAAGESSHGNEREFCLQGKANWMAFVAPSICIAIIMVGIFSTHYFQQKVFVLLAALRPQWCSREIPDPANSTCAKKYPIAEEKTQLPLDRLLIDWPTPEDPEPLVISEVLHQVTPVFRHPPCSNWPQREKGIQGHQASEKDMMHSASSPPPPRALQAESRQLVDLYKVLESRGSDPKPENPACPWTVLPAGDLPTHDGYLPSNIDDLPSHEAPLADSLEELEPQHISLSVFPSSSLHPLTFSCGDKLTLDQLKMRCDSLML

SEQ ID NO: 302 - protein, 662 aa, Homo sapiens
MEPLVTWVVPLLFLFLLSRQGAACRTSECCFQDPPYPDADSGSASGPRDLRCYRISSDRYECSWQYEGPTAGVSHFLRCCLSSGRCCYFAAGSATRLQFSDQAGVSVLYTVTLWVESWARNQTEKSPEVTLQLYNSVKYEPPLGDIKVSKLAGQLRMEWETPDNQVGAEVQFRHRTPSSPWKLGDCGPQDDDTESCLCPLEMNVAQEFQLRRRQLGSQGSSWSKWSSPVCVPPENPPQPQVRFSVEQLGQDGRRRLTLKEQPTQLELPEGCQGLAPGTEVTYRLQLHMLSCPCKAKATRTLHLGKMPYLSGAAYNVAVISSNQFGPGLNQTWHIPADTHTEPVALNISVGTNGTTMYWPARAQSMTYCIEWQPVGQDGGLATCSLTAPQDPDPAGMATYSWSRESGAMGQEKCYYITIFASAHPEKLTLWSTVLSTYHFGGNASAAGTPHHVSVKNHSLDSVSVDWAPSLLSTCPGVLKEYVVRCRDEDSKQVSEHPVQPTETQVTLSGLRAGVAYTVQVRADTAWLRGVWSQPQRFSIEVQVSDWLIFFASLGSFLSILLVGVLGYLGLNRAARHLCPPLPTPCASSAIEFPGGKETWQWINPVDFQEEASLQEALVVEMSWDKGERTEPLEKTELPEGAPELALDTELSLEDGDRCKAKM

SEQ ID NO: 303 - protein, 521 aa, Homo sapiens
MGLGRCIWEGWTLESEALRRDMGTWLLACICICTCVCLGVSVTGEGQGPRSRTFTCLTNNILRIDCHWSAPELGQGSSPWLLFTSNQAPGGTHKCILRGSECTVVLPPEAVLVPSDNFTITFHHCMSGREQVSLVDPEYLPRRHVKLDPPSDLQSNISSGHCILTWSISPALEPMTTLLSYELAFKKQEEAWEQAQHRDHIVGVTWLILEAFELDPGFIHEARLRVQMATLEDDVVEEERYTGQWSEWSQPVCFQAPQRQGPLIPPWGWPGNTLVAVSIFLLLTGPTYLLFKLSPRVKRIFYQNVPSPAMFFQPLYSVHNGNFQTWMGAHGAGVLLSQDCAGTPQGALEPCVQEATALLTCGPARPWKSVALEEEQEGPGTRLPGNLSSEDVLPAGCTEWRVQTLAYLPQEDWAPTSLTRPAPPDSEGSRSSSSSSSSNNNNYCALGCYGGWHLSALPGNTQSSGPIPALACGLSCDHQGLETQQGVAWVLAGHCQRPGLHEDLQGMLLPSVLSKARSWTF

SEQ ID NO: 304 - protein, 578 aa, Homo sapiens
MLPCLVVLLAALLSLRLGSDAHGTELPSPPSVWFEAEFFHHILHWTPIPNQSESTCYEVALLRYGIESWNSISNCSQTLSYDLTAVTLDLYHSNGYRARVRAVDGSRHSNWTVTNTRFSVDEVTLTVGSVNLEIHNGFILGKIQLPRPKMAPANDTYESIFSHFREYEIAIRKVPGNFTFTHKKVKHENFSLLTSGEVGEFCVQVKPSVASRSNKGMWSKEECISLTRQYFTVTNVIIFFAFVLLLSGALAYCLALQLYVRRRKKLPSVLLFKKPSPFIFISQRPSPETQDTIHPLDEEAFLKVSPELKNLDLHGSTDSGFGSTKPSLQTEEPQFLLPDPHPQADRTLGNREPPVLGDSCSSGSSNSTDSGICLQEPSLSPSTGPTWEQQVGSNSRGQDDSGIDLVQNSEGRAGDTQGGSALGHHSPPEPEVPGEEDPAAVAFQGYLRQTRCAEEKATKTGCLEEESPLTDGLGPKFGRCLVDEAGLHPPALAKGYLKQDPLEMTLASSGAPTGQWNQPTEEWSLLALSSCSDLGISDWSFAHDLAPLGCVAAPGGLLGSFNSDLVTLPLISSLQSSE

SEQ ID NO: 305 - protein, 325 aa, Homo sapiens
MAWSLGSWLGGCLLVSALGMVPPPENVRMNSVNFKNILQWESPAFAKGNLTFTAQYLSYRIFQDKCMNTTLTECDFSSLSKYGDHTLRVRAEFADEHSDWVNITFCPVDDTIIGPPGMQVEVLADSLHMRFLAPKIENEYETWTMKNVYNSWTYNVQYWKNGTDEKFQITPQYDFEVLRNLEPWTTYCVQVRGFLPDRNKAGEWSEPVCEQTTHDETVPSWMVAVILMASVFMVCLALLGCFALLWCVYKKTKYAFSPRNSLPQHLKEFLGHPHHNTLLFFSFPLSDENDVFDKLSVIAEDSESGKQNPGDSCSLGTPPGQGPQS

SEQ ID NO: 306 - protein, 468 aa, Homo sapiens
MLAVGCALLAALLAAPGAALAPRRCPAQEVARGVLTSLPGDSVTLTCPGVEPEDNATVHWVLRKPAAGSHPSRWAGMGRRLLLRSVQLHDSGNYSCYRAGRPAGTVHLLVDVPPEEPQLSCFRKSPLSNVVCEWGPRSTPSLTTKAVLLVRKFQNSPAEDFQEPCQYSQESQKFSCQLAVPEGDSSFYIVSMCVASSVGSKFSKTQTFQGCGILQPDPPANITVTAVARNPRWLSVTWQDPHSWNSSFYRLRFELRYRAERSKTFTTWMVKDLQHHCVIHDAWSGLRHVVQLRAQEEFGQGEWSEWSPEAMGTPWTESRSPPAENEVSTPMQALTTNKDDDNILFRDSANATSLPVQDSSSVPLPTFLVAGGSLAFGTLLCIAIVLRFKKTWKLRALKEGKTSMHPPYSLGQLVPERPRPTPVLVPLISPPVSPSSLGSDNTSSHNRPDARDPRSPYDISNTDYFFPR

SEQ ID NO: 307 - protein, 378 aa, Homo sapiens
MVLLWLTLLLIALPCLLQTKEDPNPPITNLRMKAKAQQLTWDLNRNVTDIECVKDADYSMPAVNNSYCQFGAISLCEVTNYTVRVANPPFSTWILFPENSGKPWAGAENLTCWIHDVDFLSCSWAVGPGAPADVQYDLYLNVANRRQQYECLHYKTDAQGTRIGCRFDDISRLSSGSQSSHILVRGRSAAFGIPCTDKFVVFSQIEILTPPNMTAKCNKTHSFMHWKMRSHFNRKFRYELQIQKRMQPVITEQVRDRTSFQLLNPGTYTVQIRARERVYEFLSAWSTPQRFECDQEEGANTRAWRTSLLIALGTLLALVCVFVICRRYLVMQRLFPRIPHMKDPIGDSFQNDKLVVWEAGKAGLEECLVTEVQVVQKT

SEQ ID NO: 308 - protein, 400 aa, Homo sapiens
MLLLVTSLLLCELPHPAFLLIPEKSDLRTVAPASSLNVRFDSRTMNLSWDCQENTTFSKCFLTDKKNRVVEPRLSNNECSCTFREICLHEGVTFEVHVNTSQRGFQQKLLYPNSGREGTAAQNFSCFIYNADLMNCTWARGPTAPRDVQYFLYIRNSKRRREIRCPYYIQDSGTHVGCHLDNLSGLTSRNYFLVNGTSREIGIQFFDSLLDTKKIERFNPPSNVTVRCNTTHCLVRWKQPRTYQKLSYLDFQYQLDVHRKNTQPGTENLLINVSGDLENRYNFPSSEPRAKHSVKIRAADVRILNWSSWSEAIEFGSDDGNLGSVYIYVLLIVGTLVCGIVLGFLFKRFLRIQRLFPPVPQIKDKLNDNHEVEDEIIWEEFTPEEGKGYREEVLTVKEIT

SEQ ID NO: 309 - protein, 897 aa, Homo sapiens
MVLAQGLLSMALLALCWERSLAGAEETIPLQTLRCYNDYTSHITCRWADTQDAQRLVNVTLIRRVNEDLLEPVSCDLSDDMPWSACPHPRCVPRRCVIPCQSFVVTDVDYFSFQPDRPLGTRLTVTLTQHVQPPEPRDLQISTDQDHFLLTWSVALGSPQSHWLSPGDLEFEVVYKRLQDSWEDAAILLSNTSQATLGPEHLMPSSTYVARVRTRLAPGSRLSGRPSKWSPEVCWDSQPGDEAQPQNLECFFDGAAVLSCSWEVRKEVASSVSFGLFYKPSPDAGEEECSPVLREGLGSLHTRHHCQIPVPDPATHGQYIVSVQPRRAEKHIKSSVNIQMAPPSLNVTKDGDSYSLRWETMKMRYEHIDHTFEIQYRKDTATWKDSKTETLQNAHSMALPALEPSTRYWARVRVRTSRTGYNGIWSEWSEARSWDTESVLPMWVLALIVIFLTIAVLLALRFCGIYGYRLRRKWEEKIPNPSKSHLFQNGSAELWPPGSMSAFTSGSPPHQGPWGSRFPELEGVFPVGFGDSEVSPLTIEDPKHVCDPPSGPDTTPAASDLPTEQPPSPQPGPPAASHTPEKQASSFDFNGPYLGPPHSRSLPDILGQPEPPQEGGSQKSPPPGSLEYLCLPAGGQVQLVPLAQAMGPGQAVEVERRPSQGAAGSPSLESGGGPAPPALGPRVGGQDQKDSPVAIPMSSGDTEDPGVASGYVSSADLVFTPNSGASSVSLVPSLGLPSDQTPSLCPGLASGPPGAPGPVKSGFEGYVELPPIEGRSPRSPRNNPVPPEAKSPVLNPGERPADVSPTSPQPEGLLVLQQVGDYCFLPGLGPGPLSLRSKPSSPGPGPEIKNLDQAFQVKKPPGQAVPQVPVIQLFKALKQQDYLSLPPWEVNKPGEVC

SEQ ID NO: 310 - protein, 420 aa, Homo sapiens
MIIVAHVLLILLGATEILQADLLPDEKISLLPPVNFTIKVTGLAQVLLQWKPNPDQEQRNVNLEYQVKINAPKEDDYETRITESKCVTILHKGFSASVRTILQNDHSLLASSWASAELHAPPGSPGTSIVNLTCTTNTTEDNYSRLRSYQVSLHCTWLVGTDAPEDTQYFLYYRYGSWTEECQEYSKDTLGRNIACWFPRTFILSKGRDWLAVLVNGSSKHSAIRPFDQLFALHAIDQINPPLNVTAEIEGTRLSIQWEKPVSAFPIHCFDYEVKIHNTRNGYLQIEKLMTNAFISIIDDLSKYDVQVRAAVSSMCREAGLWSEWSQPIYVGNDEHKPLREWFVIVIMATICFILLILSLICKICHLWIKLFPPIPAPKSNIKDLFVTTNYEKAGSSETEIEVICYIEKPGVETLEDSVF

SEQ ID NO: 311 - protein, 459 aa, Homo sapiens [sequence omitted]

SEQ ID NO: 312 - protein, 508 aa, Homo sapiens
MDHLGASLWPQVGSLCLLLAGAAWAPPPNLPDPKFESKAALLAARGPEELLCFTERLEDLVCFWEEAASAGVGPGNYSFSYQLEDEPWKLCRLHQAPTARGAVRFWCSLPTADTSSFVPLELRVTAASGAPRYHRVIHINEVVLLDAPVGLVARLADESGHVVLRWLPPPETPMTSHIRYEVDVSAGNGAGSVQRVEILEGRTECVLSNLRGRTRYTFAVRARMAEPSFGGFWSAWSEPVSLLTPSDLDPLILTLSLILVVILVLLTVLALLSHRRALKQKIWPGIPSPESEFEGLFTTHKGNFQLWLYQNDGCLWWSPCTPFTEDPPASLEVLSERCWGTMQAVEPGTDDEGPLLEPVGSEHAQDTYLVLDKWLLPRNPPSEDLPGPGGSVDIVAMDEGSEASSCSSALASKPSPEGASAASFEYTILDPSSQLLRPWTLCPELPPTPPHLKYLYLVVSDSGISTDYSSGDSQGAQGGLSDGPYSNPYENSLIPAAEPLPPSYVACS

SEQ ID NO: 313 - protein, 267 aa, Homo sapiens
MAPRRARGCRTLGLPALLLLLLLRPPATRGITCPPPMSVEHADIWVKSYSLYSRERYICNSGFKRKAGTSSLTECVLNKATNVAHWTTPSLKCIRDPALVHQRPAPPSTVTTAGVTPQPESLSPSGKEPAASSPSSNNTAATTAAIVPGSQLMPSKSPSTGTTEISSHESSHGTPSQTTAKNWELTASASHQPPGVYPQGHSDTTVAISTSTVLLCGLSAVSLLACYLKSRQTPPLASVEMEAMEALPVTWGTSSRDEDLENCSHHL

SEQ ID NO: 314 - protein, 255 aa, Homo sapiens
MGNSCYNIVATLLLVLNFERTRSLQDPCSNCPAGTFCDNNRNQICSPCPPNSFSSAGGQRTCDICRQCKGVFRTRKECSSTSNAECDCTPGFHCLGAGCSMCEQDCKQGQELTKKGCKDCCFGTFNDQKRGICRPWTNCSLDGKSVLVNGTKERDVVCGPSPADLSPGASSVTPPAPAREPGHSPQIISFFLALTSTALLFLLFFLTLRFSVVKRGRKKLLYIFKQPFMRPVQTTQEEDGCSCRFPEEEEGGCEL

SEQ ID NO: 315 - protein, 184 aa, Homo sapiens
MLQMAGQCSQNEYFDSLLHACIPCQLRCSSNTPPLTCQRYCNASVTNSVKGTNAILWTCLGLSLIISLAVFVLMFLLRKINSEPLKDEFKNTGSGLLGMANIDLEKSRTGDEIILPRGLEYTVEECTCEDCIKSKPKVDSDHCFPLPAMEEGATILVTTKTNDYCKSLPAALSATEIEKSISAR

SEQ ID NO: 316 - protein, 260 aa, Homo sapiens
MARPHPWWLCVLGTLVGLSATPAPKSCPERHYWAQGKLCCQMCEPGTFLVKDCDQHRKAAQCDPCIPGVSFSPDHHTRPHCESCRHCNSGLLVRNCTITANAECACRNGWQCRDKECTECDPLPNPSLTARSSQALSPHPQPTHLPYVSEMLEARTAGHMQTLADFRQLPARTLSTHWPPQRSLCSSDFIRILVIFSGMFLVFTLAGALFLHQRRKYRSNKGESPVEPAEPCHYSCPREEEGSTIPIQEDYRKPEPACSP

SEQ ID NO: 317 - protein, 595 aa, Homo sapiens
MRVLLAALGLLFLGALRAFPQDRPFEDTCHGNPSHYYDKAVRRCCYRCPMGLFPTQQCPQRPTDCRKQCEPDYYLDEADRCTACVTCSRDDLVEKTPCAWNSSRVCECRPGMFCSTSAVNSCARCFFHSVCPAGMIVKFPGTAQKNTVCEPASPGVSPACASPENCKEPSSGTIPQAKPTPVSPATSSASTMPVRGGTRLAQEAASKLTRAPDSPSSVGRPSSDPGLSPTQPCPEGSGDCRKQCEPDYYLDEAGRCTACVSCSRDDLVEKTPCAWNSSRTCECRPGMICATSATNSCARCVPYPICAAETVTKPQDMAEKDTTFEAPPLGTQPDCNPTPENGEAPASTSPTQSLLVDSQASKTLPIPTSAPVALSSTGKPVLDAGPVLFWVILVLVVVVGSSAFLLCHRRACRKRIRQKLHLCYPVQTSQPKLELVDSRPRRSSTQLRSGASVTEPVAEERGLMSQPLMETCHSVGAAYLESLPLQDASPAGGPSSPRDLPEPRVSTEHTNNKIEKIYIMKADTVIVGTVKAELPEGRGLAGPAEPELEEELEADHTPHYPEQETEPPLGSCSDVMLSVEEEGKEDPLPTAASGK

SEQ ID NO: 318 - protein, 277 aa, Homo sapiens
MVRLPLQCVLWGCLLTAVHPEPPTACREKQYLINSQCCSLCQPGQKLVSDCTEFTETECLPCGESEFLDTWNRETHCHQHKYCDPNLGLRVQQKGTSETDTICTCEEGWHCTSEACESCVLHRSCSPGFGVKQIATGVSDTICEPCPVGFFSNVSSAFEKCHPWTSCETKDLVVQQAGTNKTDVVCGPQDRLRALVVIPIIFGILFAILLVLVFIKKVAKKPTNKAPHPKQEPQEINFPDDLPGSNTAAPVQETLHGCQPVTQEDGKESRISVQERQ

SEQ ID NO: 319 - protein, 448 aa, Homo sapiens
MAHVGDCTQTPWLPVLVVSLMCSARAEYSNCGENEYYNQTTGLCQECPPCGPGEEPYLSCGYGTKDEDYGCVPCPAEKFSKGGYQICRRHKDCEGFFRATVLTPGDMENDAECGPCLPGYYMLENRPRNIYGMVCYSCLLAPPNTKECVGATSGASANFPGTSGSSTLSPFQHAHKELSGQGHLATALIIAMSTIFIMAIAIVLIIMFYILKTKPSAPACCTSHPGKSVEAQVSKDEEKKEAPDNVVMFSEKDEFEKLTATPAKPTKSENDASSENEQLLSRSVDSDEEPAPDKQGSPELCLLSLVHLAREKSATSNKSAGIQSRRKKILDVYANVCGVVEGLSPTELPFDCLEKTSRMLSSTYNSEKAVVKTWRHLAESFGLKRDEIGGMTDGMQLFDRISTAGYSIPELLTKLVQIERLDAVESLCADILEWAGVVPPASQPHAAS

SEQ ID NO: 320 - protein, 277 aa, Homo sapiens
MCVGARRLGRGPCAALLLLGLGLSTVTGLHCVGDTYPSNDRCCHECRPGNGMVSRCSRSQNTVCRPCGPGFYNDVVSSKPCKPCTWCNLRSGSERKQLCTATQDTVCRCRAGTQPLDSYKPGVDCAPCPPGHFSPGDNQACKPWTNCTLAGKHTLQPASNSSDAICEDRDPPATQPQETQGPPARPITVQPTEAWPRTSQGPSTRPVEVPGGRAVAAILGLGLVLGLLGPLAILLALYLLRRDQRLPPDAHKPPGGGSFRTPIQEEQADAHSTLAKI

SEQ ID NO: 321 - protein, 293 aa, Homo sapiens
MSGLGRSRRGGRSRVDQEERFPQGLWTGVAMRSCPEEQYWDPLLGTCMSCKTICNHQSQRTCAAFCRSLSCRKEQGKFYDHLLRDCISCASICGQHPKQCAYFCENKLRSPVNLPPELRRQRSGEVENNSDNSGRYQGLEHRGSEASPALPGLKLSADQVALVYSTLGLCLCAVLCCFLVAVACFLKKRGDPCSCQPRSRPRQSPAKSSQDHAMEAGSPVSTSPEPVETCSFCFPECRAPTQESAVTPGTPDPTCAGRWGCHTRTTVLQPCPHIPDSGLGIVCVPAQEGGPGA

SEQ ID NO: 322 - protein, 455 aa, Homo sapiens
MGLSTVPDLLLPLVLLELLVGIYPSGVIGLVPHLGDREKRDSVCPQGKYIHPQNNSICCTKCHKGTYLYNDCPGPGQDTDCRECESGSFTASENHLRHCLSCSKCRKEMGQVEISSCTVDRDTVCGCRKNQYRHYWSENLFQCFNCSLCLNGTVHLSCQEKQNTVCTCHAGFFLRENECVSCSNCKKSLECTKLCLPQIENVKGTEDSGTTVLLPLVIFFGLCLLSLLFIGLMYRYQRWKSKLYSIVCGKSTPEKEGELEGTTTKPLAPNPSFSPTPGFTPTLGFSPVPSSTFTSSSTYTPGDCPNFAAPRREVAPPYQGADPILATALASDPIPNPLQKWEDSAHKPQSLDTDDPATLYAVVENVPPLRWKEFVRRLGLSDHEIDRLELQNGRCLREAQYSMLATWRRRTPRREATLELLGRVLRDMDLLGCLEDIEEALCGPAALPPAPSLLR

SEQ ID NO: 323 - protein, 461 aa, Homo sapiens
MAPVAVWAALAVGLELWAAAHALPAQVAFTPYAPEPGSTCRLREYYDQTAQMCCSKCSPGQHAKVFCTKTSDTVCDSCEDSTYTQLWNWVPECLSCGSRCSSDQVETQACTREQNRICTCRPGWYCALSKQEGCRLCAPLRKCRPGFGVARPGTETSDVVCKPCAPGTFSNTTSSTDICRPHQICNVVAIPGNASMDAVCTSTSPTRSMAPGAVHLPQPVSTRSQHTQPTPEPSTAPSTSFLLPMGPSPPAEGSTGDFALPVGLIVGVTALGLLIIGVVNCVIMTQVKKKPLCLQREAKVPHLPADKARGTQGPEQQHLLITAPSSSSSSLESSASALDRRAPTRNQPQAPGVEASGAGEARASTGSSDSSPGGHGTQVNVTCIVNVCSSSDHSSQCSSQASSTMGDTDSSPSESPKDEQVPFSKEECAFRSQLETPETLLGSTEEKPLPLGVPDAGMKPS

SEQ ID NO: 324 - protein, 423 aa, Homo sapiens
MALKVLLEQEKTFFTLLVLLGYLSCKVTCESGDCRQQEFRDRSGNCVPCNQCGPGMELSKECGFGYGEDAQCVTCRLHRFKEDWGFQKCKPCLDCAVVNRFQKANCSATSDAICGDCLPGFYRKTKLVGFQDMECVPCGDPPPPYEPHCASKVNLVKIASTASSPRDTALAAVICSALATVLLALLILCVIYCKRQFMEKKPSWSLRSQDIQYNGSELSCFDRPQLHEYAHRACCQCRRDSVQTCGPVRLLPSMCCEEACSPNPATLGCGVHSAASLQARNAGPAGEMVPTFFGSLTQSICGEFSDAWPLMQNPMGGDNISFCDSYPELTGEDIHSLNPELESSTSLDSNSSQDLVGGAVPVQSHSENFTAATDLSRYNNTLVESASTQDALTMRSQLDQESGAVIHPATQTSLQVRQRLGSL

SEQ ID NO: 325 - protein, 233 aa, Homo sapiens
MSTESMIRDVELAEEALPKKTGGPQGSRRCLFLSLFSFLIVAGATTLFCLLHFGVIGPQREEFPRDLSLISPLAQAVRSSSRTPSDKPVAHVVANPQAEGQLQWLNRRANALLANGVELRDNQLVVPSEGLYLIYSQVLFKGQGCPSTHVLLTHTISRIAVSYQTKVNLLSAIKSPCQRETPEGAEAKPWYEPIYLGGVFQLEKGDRLSAEINRPDYLDFAESGQVYFGIIAL

SEQ ID NO: 326 - protein, 205 aa, Homo sapiens
MTPPERLFLPRVCGTTLHLLLLGLLLVLLPGAQGLPGVGLTPSAAQTARQHPKMHLAHSTLKPAAHLIGDPSKQNSLLWRANTDRAFLQDGFSLSNNSLLVPTSGIYFVYSQVVFSGKAYSPKATSSPLYLAHEVQLFSSQYPFHVPLLSSQKMVYPGLQEPWLHSMYHGAAFQLTQGDQLSTHTDGIPHLVLSPSTVFFGAFAL

SEQ ID NO: 327 - protein, 244 aa, Homo sapiens
MGALGLEGRGGRLQGRGSLLLAVAGATSLVTLLLAVPITVLAVLALVPQDQGGLVTETADPGAQAQQGLGFQKLPEEEPETDLSPGLPAAHLIGAPLKGQGLGWETTKEQAFLTSGTQFSDAEGLALPQDGLYYLYCLVGYRGRAPPGGGDPQGRSVTLRSSLYRAGGAYGPGTPELLLEGAETVTPVLDPARRQGYGPLWYTSVGFGGLVQLRRGERVYVNISHPDMVDFARGKTFFGAVMVG

SEQ ID NO: 328 - protein, 317 aa, Homo sapiens
MRRASRDYTKYLRGSEEMGGGPGAPHEGPLHAPPPPAPHQPPAASRSMFVALLGLGLGQVVCSVALFFYFRAQMDPNRISEDGTHCIYRILRLHENADFQDTTLESQDTKLIPDSCRRIKQAFQGAVQKELQHIVGSQHIRAEKAMVDGSWLDLAKRSKLEAQPFAHLTINATDIPSGSHKVSLSSWYHDRGWAKISNMTFSNGKLIVNQDGFYYLYANICFRHHETSGDLATEYLQLMVYVTKTSIKIPSSHTLMKGGSTKYWSGNSEFHFYSINVGGFFKLRSGEEISIEVSNPSLLDPDQDATYFGAFKVRDID

SEQ ID NO: 329 - protein, 281 aa, Homo sapiens; identical to SEQ ID NO: 204

SEQ ID NO: 330 - protein, 193 aa, Homo sapiens
MPEEGSGCSVRRRPYGCVLRAALVPLVAGLVICLVVCIQRFAQAQQQLPLESLGWDVAELQLNHTGPQQDPRLYWQGGPALGRSFLHGPELDKGQLRIHRDGIYMVHIQVTLAICSSTTASRHHPTTLAVGICSPASRSISLLRLSFHQGCTIASQRLTPLARGDTLCTNLTGTLLPSRNTDETFFGVQWVRP

SEQ ID NO: 331 - protein, 234 aa, Homo sapiens
MDPGLQQALNGMAPPGDTAMHVPAGSVASHLGTTSRSYFYLTTATLALCLVFTVATIMVLVVQRTDSIPNSPDNVPLKGGNCSEDLLCILKRAPFKKSWAYLQVAKHLNKTKLSWNKDGILHGVRYQDGNLVIQFPGLYFIICQLQFLVQCPNNSVDLKLELLINKHIKKQALVTVCESGMQTKHVYQNLSQFLLDYLQVNTTISVNVDTFQYIDTSTFPLENVLSIFLYSNSD

SEQ ID NO: 332 - protein, 261 aa, Homo sapiens
MIETYNQTSPRSAATGLPISMKIFMYLLTVFLITQMIGSALFAVYLHRRLDKIEDERNLHEDFVFMKTIQRCNTGERSLSLLNCEEIKSQFEGFVKDIMLNKEETKKENSFEMQKGDQNPQIAAHVISEASSKTTSVLQWAEKGYYTMSNNLVTLENGKQLTVKRQGLYYIYAQVTFCSNREASSQAPFIASLCLKSPGRFERILLRAANTHSSAKPCGQQSIHLGGVFELQPGASVFVNVTDPSQVSHGTGFTSFGLLKL

SEQ ID NO: 333 - protein, 254 aa, Homo sapiens
MEYASDASLDPEAPWPPAPRARACRVLPWALVAGLLLLLLLAAACAVFLACPWAVSGARASPGSAASPRLREGPELSPDDPAGLLDLRQGMFAQLVAQNVLLIDGPLSWYSDPGLAGVSLTGGLSYKEDTKELVVAKAGVYYVFFQLELRRVVAGEGSGSVSLALHLQPLRSAAGAAALALTVDLPPASSEARNSAFGFQGRLLHLSAGQRLGVHLHTEARARHAWQLTQGATVLGLFRVTPEIPAGLPSPRSE

SEQ ID NO: 334 - protein, 300 aa, Homo sapiens
MRALEGPGLSLLCLVLALPALLPVPAVRGVAETPTYPWRDAETGERLVCAQCPPGTFVQRPCRRDSPTTCGPCPPRHYTQFWNYLERCRYCNVLCGEREEEARACHATHNRACRCRTGFFAHAGFCLEHASCPPGAGVIAPGTPSQNTQCQPCPPGTFSASSSSSEQCQPHRNCTALGLALNVPGSSSHDTLCTSCTGFPLSTRVPGAEECERAVIDFVAFQDISIKRLQRLLQALEAPEGWGPTPRAGRAALQLKLRRRLTELLGAQDGALLVRLLQALRVARMPGLERSVRERFLPVH

SEQ ID NO: 335 - protein, 183 aa, Homo sapiens
MERVQPLEENVGNAARPRFERNKLLLVASVIQGLGLLLCFTYICLHFSALQVSHRYPRIQSIKVQFTEYKKEKGFILTSQKEDEIMKVQNNSVIINCDGFYLISLKGYFSQEVNISLHYQKDEEPLFQLKKVRSVNSLMVASLTYKDKVYLNVTTDNTSLDDFHVNGGELILIHQNPGEFCVL

SEQ ID NO: 336 - protein, 99 aa, Homo sapiens
MKASAALLCLLLTAAAFSPQGLAQPVGINTSTTCCYRFINKKIPKQRLESYRRTTSSHCPREAVIFKTKLDKEICADPTQKWVQDFMKHLDKKTQTPKL

SEQ ID NO: 337 - protein, 99 aa, Homo sapiens
MKVSAALLCLLLIAATFIPQGLAQPDAINAPVTCCYNFTNRKISVQRLASYRRITSSKCPKEAVIFKTIVAKEICADPKQKWVQDSMDHLDKQTQTPKT

SEQ ID NO: 338 - protein, 107 aa, Homo sapiens
MARATLSAAPSNPRLLRVALLLLLLVAASRRAAGAPLATELRCQCLQTLQGIHLKNIQSVKVKSPGPHCAQTEVIATLKNGQKACLNPASPMVKKIIEKMLKNGKSN

SEQ ID NO: 339 - protein, 107 aa, Homo sapiens
MAHATLSAAPSNPRLLRVALLLLLLVAASRRAAGASVVTELRCQCLQTLQGIHLKNIQSVNVRSPGPHCAQTEVIATLKNGKKACLNPASPMVQKIIEKILNKGSTN

SEQ ID NO: 340 - protein, 107 aa, Homo sapiens
MARAALSAAPSNPRLLRVALLLLLLVAAGRRAAGASVATELRCQCLQTLQGIHPKNIQSVNVKSPGPHCAQTEVIATLKNGRKACLNPASPIVKKIIEKMLNSDKSN

SEQ ID NO: 341 - protein, 99 aa, Homo sapiens
MTSKLAVALLAAFLISAALCEGAVLPRSAKELRCQCIKTYSKPFHPKFIKELRVIESGPHCANTEIIVKLSDGRELCLDPKENWVQRVVEKFLKRAENS

SEQ ID NO: 342 - protein, 113 aa, Homo sapiens
MKVSVAALSCLMLVAVLGSQAQFINDAETELMMSKLPLENPVVLNSFHFAADCCTSYISQSIPCSLMKSYFETSSECSKPGVIFLTKKGRQVCAKPSGPGVQDCMKKLKPYSI

SEQ ID NO: 343 - protein, 93 aa, Homo sapiens
MKISVAAIPFFLLITIALGTKTESSSRGPYHPSECCFTYTTYKIPRQRIMDYYETNSQCSKPGIVFITKRGHSVCTNPSDKWVQDYIKDMKEN

SEQ ID NO: 344 - protein, 99 aa, Homo sapiens
MKVSAALLCLLLMAATFSPQGLAQPDSVSIPITCCFNVINRKIPIQRLESYTRITNIQCPKEAVIFKTKRGKEVCADPKERWVRDSMKHLDQIFQNLKP

SEQ ID NO: 345 - protein, 93 aa, Homo sapiens
MDRLQTALLVVLVLLAVALQATEAGPYGANMEDSVCCRDYVRYRLPLRVVKHFYWTSDSCPRPGVVLLTFRDKEICADPRVPWVKMILNKLSQ

SEQ ID NO: 346 - protein, 134 aa, Homo sapiens; identical to SEQ ID NO: 246

SEQ ID NO: 347 - protein, 98 aa, Homo sapiens
MKVSAVLLCLLLMTAAFNPQGLAQPDALNVPSTCCFTFSSKKISLQRLKSYVITTSRCPQKAVIFRTKLGKEICADPKEKWVQNYMKHLGRKAHTLKT

SEQ ID NO: 348 - protein, 150 aa, Homo sapiens
MNLWLLACLVAGFLGAWAPAVHTQGVFEDCCLAYHYPIGWAVLRRAWTYRIQEVSGSCNLPAAIFYLPKRHRKVCGNPKSREVQRAMKLLDARNKVFAKLHHNTQTFQAGPHAVKKLSSGNSKLSSSKFSNPISSSKRNVSLLISANSGL

SEQ ID NO: 349 - protein, 94 aa, Homo sapiens
MMGLSLASAVLLASLLSLHLGTATRGSDISKTCCFQYSHKPLPWTWVRSYEFTSNSCSQRAVIFTTKRGKKVCTHPRKKWVQKYISLLKTPKQL

SEQ ID NO: 350 - protein, 111 aa, Homo sapiens
MSLLPRRAPPVSMRLLAAALLLLLLALYTARVDGSKCKCSRKGPKIRYSDVKKLEMKPKYPHCEEKMVIITTKSVSRYRGQEHCLHPKLQSTKRFIKWYNAWNEKRRVYEE

SEQ ID NO: 351 - protein, 125 aa, Homo sapiens
MKKSGVLFLLGIILLVLIGVQGTPVVRKGRCSCISTNQGTIHLQSLKDLKQFAPSPSCEKIEIIATLKNGVQTCLNPDSADVKELIKKWEKQVSQKKKQKNGKKHQKKKVLKVRKSQRSRQKKTT

SEQ ID NO: 352 - protein, 114 aa, Homo sapiens
MSLLSSRAARVPGPSSSLCALLVLLLLLTQPGPIASAGPAAAVLRELRCVCLQTTQGVHPKMISNLQVFAIGPQCSKVEVVASLKNGKEICLDPEAPFLKKVIQKILDGGNKEN

SEQ ID NO: 353 - protein, 128 aa, Homo sapiens
MSLRLDTTPSCNSARPLHALQVLLLLSLLLTALASSTKGQTKRNLAKGKEESLDSDLYAELRCMCIKTTSGIHPKNIQSLEVIGKGTHCNQVEVIATLKDGRKICLDPDAPRIKKIVQKKLAGDESAD

SEQ ID NO: 354 - protein, 85 aa, Homo sapiens
NLAKGKEESLDSDLYAELRCMCIKTTSGIHPKNIQSLEVIGKGTHCNQVEVIATLKDGRKICLDPDAPRIKKIVQKKLAGDESAD

SEQ ID NO: 355 - protein, 81 aa, Homo sapiens
GKEESLDSDLYAELRCMCIKTTSGIHPKNIQSLEVIGKGTHCNQVEVIATLKDGRKICLDPDAPRIKKIVQKKLAGDESAD

SEQ ID NO: 356 - protein, 70 aa, Homo sapiens
AELRCMCIKTTSGIHPKNIQSLEVIGKGTHCNQVEVIATLKDGRKICLDPDAPRIKKIVQKKLAGDESAD

SEQ ID NO: 357 - protein, 114 aa, Homo sapiens
MSLPSSRAARVPGPSGSLCALLALLLLLTPPGPLASAGPVSAVLTELRCTCLRVTLRVNPKTIGKLQVFPAGPQCSKVEVVASLKNGKQVCLDPEAPFLKKVIQKILDSGNKKN

SEQ ID NO: 358 - protein, 92 aa, Homo sapiens
MKLCVTVLSLLMLVAAFCSPALSAPMGSDPPTACCFSYTARKLPRNFVVDYYETSSLCSQPAVVFQTKRSKQVCADPSESWVQEYVYDLELN

SEQ ID NO: 359 - protein, 101 aa, Homo sapiens
MSSAAGFCASRPGLLFLGLLLLPLVVAFASAEAEEDGDLQCLCVKTTSQVRPRHITSLEVIKAGPHCPTAQLIATLKNGRKICLDLQAPLYKKIIKKLLES

SEQ ID NO: 360 - protein, 96 aa, Homo sapiens
MQIITTALVCLLLAGMWPEDVDSKSMQVPFSRCCFSFAEQEIPLRAILCYRNTSSICSNEGLIFKLKRGKEACALDTVGWVQRHRKMLRHCPSKRK

SEQ ID NO: 361 - protein, 93 aa, Homo sapiens; identical to SEQ ID NO: 343

SEQ ID NO: 362 - protein, 374 aa, Homo sapiens
MLSTSRSRFIRNTNESGEEVTTFFDYDYGAPCHKFDVKQIGAQLLPPLYSLVFIFGFVGNMLVVLILINCKKLKCLTDIYLLNLAISDLLFLITLPLWAHSAANEWVFGNAMCKLFTGLYHIGYFGGIFFIILLTIDRYLAIVHAVFALKARTVTFGVVTSVITWLVAVFASVPGIIFTKCQKEDSVYVCGPYFPRGWNNFHTIMRNILGLVLPLLIMVICYSGILKTLLRCRNEKKRHRAVRVIFTIMIVYFLFWTPYNIVILLNTFQEFFGLSNCESTSQLDQATQVTETLGMTHCCINPIIYAFVGEKFRSLFHIALGCRIAPLQKPVCGGPGVRPGKNVKVTTQGLLDGRGKGKSIGRAPEASLQDKEGA

SEQ ID NO: 363 - protein, 94 aa, Homo sapiens
MSVKGMAIALAVILCATVVQGFPMFKRGRCLCIGPGVKAVKVADIEKASIMYPSNNCDKIEVIITLKENKGQRCLNPKSKQARLIIKKVERKNF

SEQ ID NO: 364 - protein, 92 aa, Homo sapiens
MQVSTAALAVLLCTMALCNQFSASLAADTPTACCFSYTSRQIPQNFIADYFETSSQCSKPGVIFLTKRSRQVCADPSEEWVQKYVSDLELSA

SEQ ID NO: 365 - protein, 180 aa, Homo sapiens
MLCLLLTLGVALVCGVPAMDIPQTKQDLELPKLAGTWHSMAMATNNISLMATLKAPLRVHITSLLPTPEDNLEIVLHRWENNSCVEKKVLGEKTENPKKFKINYTVANEATLLDTDYDNFLFLCLQDTTTPIQSMMCQYLARVLVEDDEIMQGFIRAFRPLPRHLWYLLDLKQMEEPCRF

SEQ ID NO: 366 - protein, 1192 aa, Homo sapiens [sequence omitted]

SEQ ID NO: 367 - protein, 373 aa, Homo sapiens
MEDLDQSPLVSSSDSPPRPQPAFKYQFVREPEDEEEEEEEEEEDEDEDLEELEVLERKPAAGLSAAPVPTAPAAGAPLMDFGNDFVPPAPRGPLPAAPPVAPERQPSWDPSPVSSTVPAPSPLSAAAVSPSKLPEDDEPPARPPPPPPASVSPQAEPVWTPPAPAPAAPPSTPAAPKRRGSSGSVVVDLLYWRDIKKTGVVFGASLFLLLSLTVFSIVSVTAYIALALLSVTISFRIYKGVIQAIQKSDEGHPFRAYLESEVAISEELVQKYSNSALGHVNCTIKELRRLFLVDDLVDSLKFAVLMWVFTYVGALFNGLTLLILALISLFSVPVIYERHQAQIDHYLGLANKNVKDAMAKIQAKIPGLKRKAE

SEQ ID NO: 368 - protein, 199 aa, Homo sapiens
MDGQKKNWKDKVVDLLYWRDIKKTGVVFGASLFLLLSLTVFSIVSVTAYIALALLSVTISFRIYKGVIQAIQKSDEGHPFRAYLESEVAISEELVQKYSNSALGHVNCTIKELRRLFLVDDLVDSLKFAVLMWVFTYVGALFNGLTLLILALISLFSVPVIYERHQAQIDHYLGLANKNVKDAMAKIQAKIPGLKRKAE

SEQ ID NO: 369 - protein, 473 aa, Homo sapiens
MKRASAGGSRLLAWVLWLQAWQVAAPCPGACVCYNEPKVTTSCPQQGLQAVPVGIPAASQRIFLHGNRISHVPAASFRACRNLTILWLHSNVLARIDAAAFTGLALLEQLDLSDNAQLRSVDPATFHGLGRLHTLHLDRCGLQELGPGLFRGLAALQYLYLQDNALQALPDDTFRDLGNLTHLFLHGNRISSVPERAFRGLHSLDRLLLHQNRVAHVHPHAFRDLGRLMTLYLFANNLSALPTEALAPLRALQYLRLNDNPWVCDCRARPLWAWLQKFRGSSSEVPCSLPQRLAGRDLKRLAANDLQGCAVATGPYHPIWTGRATDEEPLGLPKCCQPDAADKASVLEPGRPASAGNALKGRVPPGDSPPGNGSGPRHINDSPFGTLPGSAEPPLTAVRPEGSEPPGFPTSGPRRRPGCSRKNRTRSHCRLGQAGSGGGGTGDSEGSGALPSLTCSLTPLGLALVLWTVLGPC

SEQ ID NO: 370 - protein, 317 aa, Homo sapiens
MAKNPPENCEDCHILNAEAFKSKKICKSLKICGLVFGILALTLIVLFWGSKHFWPEVPKKAYDMEHTFYSNGEKKKIYMEIDPVTRTEIFRSGNGTDETLEVHDFKNGYTGIYFVGLQKCFIKTQIKVIPEFSEPEEEIDENEEITTTFFEQSVIWVPAEKPIENRDFLKNSKILEICDNVTMYWINPTLISVSELQDFEEEGEDLHFPANEKKGIEQNEQWVVPQVKVEKTRHARQASEEELPINDYTENGIEFDPMLDERGYCCIYCRRGNRYCRRVCEPLLGYYPYPYCYQGGRVICRVIMPCNWWVARMLGRV

SEQ ID NO: 371 - protein, 164 aa, Homo sapiens
MNFLLSWVHWSLALLLYLHHAKWSQAAPMAEGGGQNHHEVVKFMDVYQRSYCHPIETLVDIFQEYPDEIEYIFKPSCVPLMRCGGCCNDEGLECVPTEESNITMQIMRIKPHQGQHIGEMSFLQHNKCECRPKKDRARQEKYVGARCCLMPWSLPGPQCDKPRR

SEQ ID NO: 372 - protein, 188 aa, Homo sapiens
MNFLLSWVHWSLALLLYLHHAKWSQAAPMAEGGGQNHHEVVKFMDVYQRSYCHPIETLVDIFQEYPDEIEYIFKPSCVPLMRCGGCCNDEGLECVPTEESNITMQIMRIKPHQGQHIGEMSFLQHNKCECRPKKDRARQEKKSVRGKGKGQKRKRKKSRYKSWSVYVGARCCLMPWSLPGPQCDKPRR

SEQ ID NO: 373 - protein, 208 aa, Homo sapiens
MNFLLSWVHWSLALLLYLHHAKWSQAAPMAEGGGQNHHEVVKFMDVYQRSYCHPIETLVDIFQEYPDEIEYIFKPSCVPLMRCGGCCNDEGLECVPTEESNITMQIMRIKPHQGQHIGEMSFLQHNKCECRPKKDRARQEKYVGARCCLMPWSLPGPHPCGPCSERRKHLFVQDPQTCKCSCKNTDSRCKARQLELNERTCRCDKPRR

SEQ ID NO: 374 - protein, 354 aa, Homo sapiens
MYREWVVVNVFMMLYVQLVQGSSNEHGPVKRSSQSTLERSEQQIRAASSLEELLRITHSEDWKLWRCRLRLKSFTSMDSRSASHRSTRFAATFYDIETLKVIDEEWQRTQCSPRETCVEVASELGKSTNTFFKPPCVNVFRCGGCCNEESLICMNTSTSYISKQLFEISVPLTSVPELVPVKVANHTGCKCLPTAPRHPYSIIRRSIQIPEEDRCSHSKKLCPIDMLWDSNKCKCVLQEENPLAGTEDHSHLQEPALCGPHMMFDEDRCECVCKTPCPKDLIQHPKNCSCFECKESLETCCQKHKLFHPDTCSCEDRCPFHTRPCASGKTACAKHCRFPKEKRAAQGPHSRKNP

SEQ ID NO: 375 - protein, 160 aa, Homo sapiens; identical to SEQ ID NO: 234

SEQ ID NO: 376 - protein, 182 aa, Homo sapiens; identical to SEQ ID NO: 235

SEQ ID NO: 377 - protein, 258 aa, Homo sapiens; identical to SEQ ID NO: 236

SEQ ID NO: 378 - protein, 355 aa, Homo sapiens
MDYTLDLSVTTVTDYYYPDIFSSPCDAELIQTNGKLLLAVFYCLLFVFSLLGNSLVILVLEVCKKLRSITDVYLLNLALSDLLFVFSFPFQTYYLLDQWVFGTVMCKVVSGFYYIGFYSSMFFITLMSVDRYLAVVHAVYALKVRTIRMGTTLCLAVWLTAIMATIPLLVFYQVASEDGVLQCYSFYNQQTLKWKIFTNFKMNILGLLIPFTIFMFCYIKILHQLKRCQNHNKTKAIRLVLIVVIASLLFWVPFNVVLFLTSLHSMHILDGCSISQQLTYATHVTEIISFTHCCVNPVIYAFVGEKFKKHLSEIFQKSCSQIFNYLGRQMPRESCEKSSSCQQHSSRSSNVDYIL

SEQ ID NO: 379 - protein, 355 aa, Homo sapiens
METPNTTEDYDTTTEFDYGDATPCQKVNERAFGAQLLPPLYSLVFVIGLVGNILVVLVLVQYKRLKNMTSIYLLNLAISDLLFLFTLPFWIDYKLKDDWVFGDAMCKILSGFYYTGLYSEIFFIILLTIDRYLAIVHAVFALRARTVTFGVITSIIIWALAILASMPGLYFSKTQWEFTHHTCSLHFPHESLREWKLFQALKLNLFGLVLPLLVMIICYTGIIKILLRRPNEKKSKAVRLIFVIMIIFFLFWTPYNLTILISVFQDFLFTHECEQSRHLDLAVQVTEVIAYTHCCVNPVIYAFVGERFRKYLRQLFHRRVAVHLVKWLPFLSVDRLERVSSTSPSTGEHELSAGF

SEQ ID NO: 380 - protein, 92 aa, Homo sapiens; identical to SEQ ID NO: 364

SEQ ID NO: 381 - protein, 93 aa, Homo sapiens
MQVSTAALAVLLCTMALCNQVLSAPLAADTPTACCFSYTSRQIPQNFIADYFETSSQCSKPSVIFLTKRGRQVCADPSEEWVQKYVSDLELSA

SEQ ID NO: 382 - protein, 211 aa, Homo sapiens [sequence omitted]

SEQ ID NO: 383 - protein, 196 aa, Homo sapiens
MRTLACLLLLGCGYLAHVLAEEAEIPREVIERLARSQIHSIRDLQRLLEIDSVGSEDSLDTSLRAHGVHATKHVPEKRPLPIRRKRSIEEAVPAVCKTRTVIYEIPRSQVDPTSANFLIWPPCVEVKRCTGCCNTSSVKCQPSRVHHRSVKVAKVEYVRKKPKLKEVQVRLEEHLECACATTSLNPDYREEDTDVR

SEQ ID NO: 384 - protein, 271 aa, Homo sapiens
MLLTSSLHHPRHQMSPGSWKKLIILLSCVFGGGGTSLQNKNPHQPMTLTWQGDPIPEELYKMLSGHSIRSFNDLQRLLQGDSGKEDGAELDLNMTRSHSGGELESLARGKRSLGSLSVAEPAMIAECKTRTEVFEISRRLIDRTNANFLVWPPCVEVQRCSGCCNNRNVQCRPTQVQLRPVQVRKIEIVRKKPIFKKATVTLEDHLACKCEIVAAARAVTRSPGTSQEQRAKTTQSRVTIRTVRVRRPPKGKHRKCKHTHDKTALKETLGA

SEQ ID NO: 385 - protein, 11 aa, Homo sapiens
RPKPQQFFGLM

SEQ ID NO: 386 - protein, 153 aa, Homo sapiens
APVRSLNCTLRDSQQKSLVMSGPYELKALHLQGQDMEQQVVFSMSFVQGEESNDKIPVALGLKEKNLYLSCVLKDDKPTLQLESVDPKNYPKKKMEKRFVFNKIEINNKLEFESAQFPNWYISTSQAENMPVFLGGTKGGQDITDFTMQFVSS

SEQ ID NO: 387 - protein, 144 aa, Homo sapiens; identical to SEQ ID NO: 279

SEQ ID NO: 388 - protein, 144 aa, Homo sapiens
MLLAMVLTSALLLCSVAGQGCPTLAGILDINFLINKMQEDPASKCHCSANVTSCLCLGIPSDNCTRPCFSERLSQMTNTTMQTRYPLIFSRVKKSVEVLKNNKCPYFSCEQPCNQTMAGNALTFLKSLLEIFQKEKMRGMRGKI

SEQ ID NO: 389 - protein, 126 aa, Homo sapiens
QGCPTLAGILDINFLINKMQEDPASKCHCSANVTSCLCLGIPSDNCTRPCFSERLSQMTNTTMQTRYPLIFSRVKKSVEVLKNNKCPYFSCEQPCNQTTAGNALTFLKSLLEIFQKEKMRGMRGKI

SEQ ID NO: 390 - protein, 126 aa, Homo sapiens
QGCPTLAGILDINFLINKMQEDPASKCHCSANVTSCLCLGIPSDNCTRPCFSERLSQMTNTTMQTRYPLIFSRVKKSVEVLKNNKCPYFSCEQPCNQTMAGNALTFLKSLLEIFQKEKMRGMRGKI

SEQ ID NO: 391 - protein, 261 aa, Homo sapiens
MLQAEAVQSPCGRKEHAECKTERRPEAGTHKREETGGNLRRESWGMVGRVRPEPGRPLRAMGKGPWTPSLGPDRDLALPPLTCGFPPQLFLLTISIFLGLGQPRSPKSKRKGQGRPGPLAPGPHQVPLDLVSRMKPYARMEEYERNIEEMVAQLRNSSELAQRKCEVNLQLWMSNKRSLSPWGYSINHDPSRIPVDLPEARCLCLGCVNPFTMQEDRSMVSVPVFSQVPVRRRLCPPPPRTGPCRQRAVMETIAVGCTCIF

SEQ ID NO: 392 - protein, 180 aa, Homo sapiens
MDWPHNLLFLLTISIFLGLGQPRSPKSKRKGQGRPGPLAPGPHQVPLDLVSRMKPYARMEEYERNIEEMVAQLRNSSELAQRKCEVNLQLWMSNKRSLSPWGYSINHDPSRIPVDLPEARCLCLGCVNPFTMQEDRSMVSVPVFSQVPVRRRLCPPPPRTGPCRQRAVMETIAVGCTCIF

SEQ ID NO: 393 - protein, 662 aa, Homo sapiens; identical to SEQ ID NO: 302

SEQ ID NO: 394 - protein, 862 aa, Homo sapiens; identical to SEQ ID NO: 301

SEQ ID NO: 395 - protein, 396 aa, Homo sapiens
MEFLKTCVLRRNACTAVCFWRSKVVQKPSVRRISTTSPRSTVMPAWVIDKYGKNEVLRFTQNMMMPIIHYPNEVIVKVHAASVNPIDVNMRSGYGATALNMKRDPLHVKIKGEEFPLTLGRDVSGVVMECGLDVKYFKPGDEVWAAVPPWKQGTLSEFVVVSGNEVSHKPKSLTHTQAASLPYVALTAWSAINKVGGLNDKNCTGKRVLILGASGGVGTFAIQVMKAWDAHVTAVCSQDASELVRKLGADDVIDYKSGSVEEQLKSLKPFDFILDNVGGSTETWAPDFLKKWSGATYVTLVTPFLLNMDRLGIADGMLQTGVTVGSKALKHFWKGVHYRWAFFMASGPCLDDIAELVDAGKIRPVIEQTFPFSKVPEAFLKVERGHARGKTVINVV

SEQ ID NO: 396 - protein, 570 aa, Homo sapiens
MTLLWCVVSLYFYGILQSDASERCDDWGLDTMRQIQVFEDEPARIKCPLFEHFLKFNYSTAHSAGLTLIWYWTRQDRDLEEPINFRLPENRISKEKDVLWFRPTLLNDTGNYTCMLRNTTYCSKVAFPLEVVQKDSCFNSPMKLPVHKLYIEYGIQRITCPNVDGYFPSSVKPTITWYMGCYKIQNFNNVIPEGMNLSFLIALISNNGNYTCVVTYPENGRTFHLTRTLTVKVVGSPKNAVPPVIHSPNDHVVYEKEPGEELLIPCTVYFSFLMDSRNEVWWTIDGKKPDDITIDVTINESISHSRTEDETRTQILSIKKVTSEDLKRSYVCHARSAKGEVAKAAKVTQKVPAPRYTVELACGFGATVLLVVILIVVYHVYWLEMVLFYRAHFGTDETILDGKEYDIYVSYARNAEEEEFVLLTLRGVLENEFGYKLCIFDRDSLPGGIVTDETLSFIQKSRRLLVVLSPNYVLQGTQALLELKAGLENMGSRGNINVILVQYKAVKETKVKELKRAKTVLTVIKWKGEKSKYPQGRFWKQLQVAMPVKKSPRRSSSDEQGLSYSSLKNV

SEQ ID NO: 397 - protein, 357 aa, Homo sapiens
MTLLWCWSLYFYGILQSDASERCDDWGLDTHRQIQVFEDEPARIKCPLFEHFLKFNYSTAHSAGLTLIWYWTRQDRDLEEPINFRLPENRISKEKDVLWFRPTLLNDTGNYTCMLRNTTYCSKVAFPLEWQKDSCFNSPMKLPVHKLYIEYGIQRITCPNVDGYFPSSVKPTITNYMGCYKIQNFNNVIPEGMNLSFLIALISNNGNYTCVVTYPENGRTFHLTRTLTVKVVGSPKNAVPPVIHSPNDHVVYEKEPGEELLIPCTVYFSFLMDSRNEVWWTIDGKKPDDITIDVTINESISHSRTEDETRTQILSIKKVTSEDLKRSYVCHARSAKGEVAKAAKVTQKVPAPRYTVE

SEQ ID NO: 398 - protein, 562 aa, Homo sapiens [sequence omitted]

SEQ ID NO: 399 - protein, 561 aa, Homo sapiens
MGMPPLLFCWVSFVLPLFVAAGNCTDVYMHHEMISEGQPFPFNCTYPPVTNGAVNLTWHRTPSKSPISINRHVRIHQDQSWILFLPLALEDSGIYQCVIKDAHSCYRIAINLTVFRKHWCDSSNEESSINSSDEYQQWLPIGKSGSLTCHLYFPESCVLDSIKWYKGCEEIKVSKKFCPTGTKLLVNNIDVEDSGSYACSARLTHLGRIFTVRNYIAVNTKEVGSGGRIPNITYPKNNSIEVQLGSTLIVDCNITDTKENTNLRCWRVNNTLVDDYYNDFKRIQEGIETNLSLRNHILYTVNITFLEVKMEDYGHPFTCHAAVSAAYIILKRPAPDFRAYLIGGLMAFLLLAVSILYIYNTFKVDIVLWYRSTFHTAQAPDDEKLYDAYVLYPKYPRESQGHDVDTLVLKILPEVLEKQCGYKLFIFGRDEFPGQAVASVIDENIKLCRRLMVLVAPETSSFSFLKNLTEEQIAVYNALVQDGMKVILIELERVKDYSTMPESIQYIRQKHGAIQWDGDFTEQAQCAKTKFWKKVRYHMPPRRYPASPPVQLLGHTPRIPG

SEQ ID NO: 400 - protein, 380 aa, Homo sapiens; identical to SEQ ID NO: 299

SEQ ID NO: 401 - protein, 137 aa, Homo sapiens
MKVSVAALSCLMLVTALGSQARVTKDAETEFMMSKLPLENPVLLDMLWRRKIGPQMTLSHAAGFHATSADCCISYTPRSIPCSLLESYFETNSECSKPGVIFLTKKGRRFCANPSDKQVQVCMRMLKLDTRIKTRKN

SEQ ID NO: 402 - protein, 101 aa, Homo sapiens
MSSAAGFCASRPGLLFLGLLLLPLVVAFASAEAEEDGDLQCLCVKTTSQVRPRHITSLEVIKAGPHCPTAQLIATLKKGRKACLNPASPIVKKIIKKLLES

SEQ ID NO: 403 - protein, 73 aa, Homo sapiens
MSAKDLQCQCIKTYSKPFHPKFIKELRVIESGPHCANTEIIVKLSDGRELCLDPKENWVQRVVEKFLKRAENS

SEQ ID NO: 404 - protein, 73 aa, Homo sapiens
MSAKELQCQCIKTYSKPFHPKFIKELRVIESGPHCANTEIIVKLSDGRELCLDPKENWVQRVVEKFLKRAENS

SEQ ID NO: 405 - protein, 98 aa, Homo sapiens; identical to SEQ ID NO: 249

SEQ ID NO: 406 - protein, 120 aa, Homo sapiens
MKVSEAALSLLVLILIITSASRSQPKVPEWVNTPSTCCLKYYEKVLPRRLVVGYRKALNCHLPAIIFVTKRNREVCTNPNDDWVQEYIKDPNLPLLPTRNLSTVKIITAKNGQPQLLNSQ

SEQ ID NO: 407 - protein, 96 aa, Homo sapiens; identical to SEQ ID NO: 248

SEQ ID NO: 408 - protein, 93 aa, Homo sapiens; identical to SEQ ID NO: 343

SEQ ID NO: 409 - protein, 109 aa, Homo sapiens
MKFISTSLLLMLLVSSLSPVQGVLEVYYTSLRCRCVQESSVFIPRRFIDRIQILPRGNGCPRKEIIVWKKNKSIVCVDPQAEWIQRMMEVLRKRSSSTLPVPVFKRKIP

SEQ ID NO: 410 - protein, 93 aa, Homo sapiens
MGLSLASAVLLASLLSLHLGTATRGSDISKTCCFQYLGTATRGSDISKTCCFQYSCSQRAVIFTTKRGKKVCTHPRKKWVQKYISLLKTPKQL

SEQ ID NO: 411 - protein, 111 aa, Homo sapiens
MAPISLSWLLRLATFCHLTVLLAGQHHGVTKCNITCSKMTSKIPVALLIHYQQNQASCGKRAIILETRQHRLFCADPKEQWVKDAMQHLDRQAAALTPKWRHLPKKPDRRG

SEQ ID NO: 412 - protein, 113 aa, Homo sapiens; identical to SEQ ID NO: 342

SEQ ID NO: 413 - protein, 150 aa, Homo sapiens [sequence omitted]

SEQ ID NO: 414 - protein, 120 aa, Homo sapiens; identical to SEQ ID NO: 406

SEQ ID NO: 415 - protein, 95 aa, Homo sapiens
MSVKGMAIALAVILCATVVQGFPMFKRGRCLCIGPGVKAVKVADIEKASIMYPSNNCDKIEVIITLKEIRKRCLTPNRASKQARLIIKKAERKNF

SEQ ID NO: 416 - protein, 127 aa, Homo sapiens
MQQRGLAIVALAVCAALHASEAILPIASSCCTEVSHHISRRLLERVNMCRIQRADGDCDLAAVILHVKRRRICVSPHNHTVKQWMKVQAAKKNGKGNVCHRKKHHGKRNSNRAHQGKHETYGHKTPY

SEQ ID NO: 417 - protein, 112 aa, Homo sapiens
MKGPPTFCSLLLLSLLLSPDPTAAFLLPPSTACCTQLYRKPLSDKLLRKVIQVELQEADGDCHLQAFVLHLAQRSICIHPQNPSLSQWFEHQERKLHGTLPKLNFGMLRKMG

SEQ ID NO: 418 - protein, 42 aa, Homo sapiens
RFEGYRPNLAESCPCRQYRAYVLTHSGELYERPERSDRQICV

SEQ ID NO: 419 - protein, 134 aa, Homo sapiens; identical to SEQ ID NO: 246

SEQ ID NO: 420 - protein, 93 aa, Homo sapiens
MARLQTALLVVLVLLAVALQATEAGPYGANMEDSVCCRDYVRYRLPLRVVKHFYWTSDSCPRPGVVLLTFRDKEICADPRVPWVKMILNKLSQ

SEQ ID NO: 421 - protein, 109 aa, Homo sapiens; identical to SEQ ID NO: 409

SEQ ID NO: 422 - protein, 93 aa, Homo sapiens; identical to SEQ ID NO: 420

SEQ ID NO: 423 - protein, 127 aa, Homo sapiens
  MOD_RES (70)..(70): Any naturally occurring amino acid
  MOD_RES (91)..(91): Any naturally occurring amino acid
MQQRGLAIVALAVCAALHASEAILPIASSCCTEVSHHISRRLLERVNMCRIQRADGDCDLAAVILHVKRXRICVSPHNHTVKQWMKVQAAXKNGKGNVCHRKKHHGKRNSNRAHQGKHETYGHKTPY

SEQ ID NO: 424 - protein, 104 aa, Homo sapiens
  MOD_RES (47)..(47): Any naturally occurring amino acid
  MOD_RES (68)..(68): Any naturally occurring amino acid
LPIASSCCTEVSHHISRRLLERVNMCRIQRADGDCDLAAVILHVKRXRICVSPHNHTVKQWMKVQAAXKNGKGNVCHRKKHHGKRNSNRAHQGKHETYGHKTPY

SEQ ID NO: 425 - protein, 69 aa, Homo sapiens
MKPVSLSYRCPCRFFESHVARANVKHLKILNTPNCALQIVARLKNNNRQVCIDPKLKWIQEYLEKALNK

SEQ ID NO: 426 - protein, 73 aa, Homo sapiens
MKPVSLSYRCPCRFFESHVARANVKHLKILNTPNCALQIVARLKNNNRQVCIDPKLKWIQEYLEKALNKRFKM

SEQ ID NO: 427 - protein, 90 aa, Homo sapiens
MAAKDVKHHHHHHGSGSDDDDKKPVSLSYRCPCRFFESHVARANVKHLKILNTPNCALQIVARLKNNNRQVCIDPKLKWIQEYLEKALNK

SEQ ID NO: 428 - protein, 94 aa, Homo sapiens
MAAKDVKHHHHHHGSGSDDDDKKPVSLSYRCPCRFFESHVARANVKHLKILNTPNCALQIVARLKNNNRQVCIDPKLKWIQEYLEKALNKRFKM

SEQ ID NO: 429 - protein, 71 aa, Homo sapiens
SIPITCCFNVINRKIPIQRLESYTRITNIQCPKEAVIFKTKRGKEVCADPKERWVRDSMKHLDQIFQNLKP

SEQ ID NO: 430 - protein, 66 aa, Homo sapiens
YSSDTTPCCFAYIARPLPRAHIKEYFYTSGKCSNPAVVFVTRKNRQVCANPEKKWVREYINSLEMS

SEQ ID NO: 431 - protein, 356 aa, Homo sapiens
MSIPLPLLQIYTSDNYTEEMGSGDYDSMKEPCFREENANFNKIFLPTIYSIIFLTGIVGNGLVILVMGYQKKLRSMTDKYRLHLSVADLLFVITLPFWAVDAVANWYFGNFLCKAVHVIYTVNLYSSVLILAFISLDRYLAIVHATNSQRPRKLLAEKVVYVGVWIPALLLTIPDFIFANVSEADDRYICDRFYPNDLWVVVFQFQHIMVGLILPGIVILSCYCIIISKLSHSKGHQKRKALKTTVILILAFFACWLPYYIGISIDSFILLEIIKQGCEFENTVHKWISITEALAFFHCCLNPILYAFLGAKFKTSAQHALTSVSRGSSLKILSKGKRGGHSSVSTESESSSFHSS

SEQ ID NO: 432 - protein, 94 aa, Homo sapiens; identical to SEQ ID NO: 349

SEQ ID NO: 433 - protein, 93 aa, Homo sapiens; identical to SEQ ID NO: 381

SEQ ID NO: 434 - protein, 92 aa, Homo sapiens; identical to SEQ ID NO: 364

SEQ ID NO: 435 - protein, 109 aa, Homo sapiens
MKISVAAIPFFLLITIALGTKTESSSQTGGKPKVVKIQLKLVGGPYHPSECCFTYTTYKIPRQRIMDYYETNSQCSKPGIVFITKRGHSVCTNPSDKWVQDYIKDMKEN

SEQ ID NO: 436 - protein, 134 aa, Homo sapiens; identical to SEQ ID NO: 246

SEQ ID NO: 437 - protein, 145 aa, Homo sapiens
MAQSLALSLLILVLAFGIPRTQGSDGGAQDCCLKYSQRKIPAKVVRSYRKQEPSLGCSIPAILFLPRKRSQAELCADPKELWVQQLMQHLDKTPSPQKPAQGCRKDRGASKTGKKGKGSKGCKSQPLTPLFCPHRTERSQTPKGP

SEQ ID NO: 438 - protein, 93 aa, Homo sapiens; identical to SEQ ID NO: 381

SEQ ID NO: 439 - protein, 89 aa, Homo sapiens
MKGLAAALLVLVCTMALCSCAQVGTNKELCCLVYTSWQIPQKFIVDYSETSPQCPKPGVILLTKRGRQICADPNKKWVQKYISDLKLNA

SEQ ID NO: 440 - protein, 69 aa, Homo sapiens
AQVGTNKELCCLVYTSWQIPQKFIVDYSETSPQCPKPGVILLTKRGRQICADPNKKWVQKYISDLKLNA

SEQ ID NO: 441 - protein, 264 aa, Homo sapiens
MKKTAIAIAVALAGFATVANADEPPQSPWDRVKDLATVYVDVLKDSGRDYVSQFEGSALGKQLNLKLLDNWDSVTSTFSKLREQLGPVTQEFWDNLEKETEGLRQEMSKDLEEVKAKVQPYLDDFQKKWQEEMELYRQKVEPLRAELQEGARQKLHELQEKLSPLGEEMRDRARAHVDALRTHLAPYSDELRQCLAARLEALKENGGARLAEYHAKATEHLSTLSEKAKPALEDLRQGLLPVLESFKVSFLSALEEYTKKLNTQ

SEQ ID NO: 442 - protein, 687 aa, Homo sapiens
MVSYWDTGVLLCALLSCLLLTGSSSGSKLKDPELSLKGTQHIMQAGQTLHLQCRGEAAHKWSLPEMVSKESERLSITKSACGRNGKQFCSTLTLNTAQANHTGFYSCKYLAVPTSKKKETESAIYIFISDTGRPFVEMYSEIPEIIHMTEGRELVIPCRVTSPNITVTLKKFPLDTLIPDGKRIIWDSRKGFIISNATYKEIGLLTCEATVNGHLYKTNYLTHRQTNTIIDVQISTPRPVKLLRGHTLVLNCTATTPLNTRVQMTWSYPDEKNKRASVRRRIDQSNSHANIFYSVLTIDKMQNKDKGLYTCRVRSGPSFKSVNTSVHIYDKAFITVKHRKQQVLETVAGKRSYRLSMKVKAFPSPEVVWLKDGLPATEKSARYLTRGYSLIIKDVTEEDAGNYTILLSIKQSNVFKNLTATLIVNVKPQIYEKAVSSFPDPALYPLGSRQILTCTAYGIPQPTIKWFWHPCNHNHSEARCDFCSNNEESFILDADSNMGNRIESITQRMAIIEGKNKMASTLVVADSRISGIYICIASNKVGTVGRNISFYITDVPNGFHVNLEKMPTEGEDLKLSCTVNKFLYRDVTWILLRTVNNRTMHYSISKQKMAITKEHSITLNLTIMNVSLQDSGTYACRARNVYTGEEILQKKEITIRGEHCNKKAVFSRISKFKSTRNDCTTQSNVKH

SEQ ID NO: 443 - protein, 668 aa, Homo sapiens
SEQNMQSKVLLAVALWLCVETRAASVGLPSVSLDLPRLSIQKDILTIKANTTLQITCRGQRDLDWLWPNNQSGSEQRVEVTECSDGLFCKTLTIPKVIGNDTGAYKCFYRETDLASVIYVYVQDYRSPFIASVSDQHGVVYITENKNKTVVIPCLGSISNLNVSLCARYPEKRFVPDGNRISWDSKKGFTIPSYMISYAGMVFCEAKINDESYQSIMYIVVVVGYRIYDVVLSPSHGIELSVGEKLVLNCTARTELNVGIDFNWEYPSSKHQHKKLVNRDLKTQSGSEMKKFLSTLTIDGVTRSDQGLYTCAASSGLMTKKNSTFVRVHEKPFVAFGSGMESLVEATVGERVRIPAKYLGYPPPEIKWYKNGIPLESNHTIKAGHVLTIMEVSERDTGNYTVILTNPISKEKQSHVVSLVVYVPPQIGEKSLISPVDSYQYGTTQTLTCTVYAIPPPHHIHWYWQLEEECANEPSQAVSVTNPYPCEEWRSVEDFQGGNKIAVNKNQFALIEGKNKTVSTLVIQAANVSALYKCEAVNKVGRGERVISFHVTRGPEITLQPDMQPTEQESVSLWCTADRSTFENLTWYKLGPQPLPIHVGELPTPVCKNLDTLWKLNATMFSNSTNDILIMELKNASLQDQGDYVCLAQDRKTKKRHCVVRQLTVLER

SEQ ID NO: 444 - protein, 780 aa, Homo sapiens
MVSYWDTGVLLCALLSCLLLTGSSSGSKLKDPELSLKGTQHIMQAGQTLHLQCRGEAAHKWSLPEMVSKESERLSITKSACGRNGKQFCSTLTLNTAQANHTGFYSCKYLAVPTSKKKETESAIYIFISDTGRPFVEMYSEIPEIIHMTEGRELVIPCRVTSPNITVTLKKFPLDTLIPDGKRIIWDSRKGFIISNATYKEIGLLTCEATVNGHLYKTNYLTHRQTNTIIDVQISTPRPVKLLRGHTLVLNCTATTPLNTRVQMTWSYPDEKNKRASVRRRIDQSNSHANIFYSVLTIDKMQNKDKGLYTCRVRSGPSFKSVNTSVHIYDKAFITVKHRKQQVLETVAGKRSYRLSMKVKAFPSPEVVWLKDGLPATEKSARYLTRGYSLIIKDVTEEDAGNYTILLSIKQSNVFKNLTATLIVNVKPQIYEKAVSSFPDPALYPLGSRQILTCTAYGIPQPTIKWFWHPCNHNHSEARCDFCSNNEESFILDADSNMGNRIESITQRMAIIEGKNKMASTLVVADSRISGIYICIASNKVGTVGRNISFYITDVPNGFHVNLEKMPTEGEDLKLSCTVNKFLYRDVTWILLRTVNNRTMHYSISKQKMAITKEHSITLNLTIMNVSLQDSGTYACRARNVYTGEEILQKKEITIRDQEAPYLLRNLSDHTVAISSSTTLDCHANGVPEPQITWFKNNHKIQQEPGIILGPGSSTLFIERVTEEDEGVYHCKATNQKGSVESSAYLTVQGTSDKSNLELITLTCTCVAATLFWLLLTLLI

SEQ ID NO: 445 - protein, 788 aa, Homo sapiens
MQSKVLLAVALWLCVETRAASVGLPSVSLDLPRLSIQKDILTIKANTTLQITCRGQRDLDWLWPNNQSGSEQRVEVTECSDGLFCKTLTIPKVIGNDTGAYKCFYRETDLASVIYVYVQDYRSPFIASVSDQHGVVYITENKNKTVVIPCLGSISNLNVSLCARYPEKRFVPDGNRISWDSKKGFTIPSYMISYAGMVFCEAKINDESYQSIMYIVVVVGYRIYDVVLSPSHGIELSVGEKLVLNCTARTELNVGIDFNWEYPSSKHQHKKLVNRDLKTQSGSEMKKFLSTLTIDGVTRSDQGLYTCAASSGLMTKKNSTFVRVHEKPFVAFGSGMESLVEATVGERVRIPAKYLGYPPPEIKWYKNGIPLESNHTIKAGHVLTIMEVSERDTGNYTVILTNPISKEKQSHVVSLVVYVPPQIGEKSLISPVDSYQYGTTQTLTCTVYAIPPPHHIHWYWQLEEECANEPSQAVSVTNPYPCEEWRSVEDFQGGNKIAVNKNQFALIEGKNKTVSTLVIQAANVSALYKCEAVNKVGRGERVISFHVTRGPEITLQPDMQPTEQESVSLWCTADRSTFENLTWYKLGPQPLPIHVGELPTPVCKNLDTLWKLNATMFSNSTNDILIMELKNASLQDQGDYVCLAQDRKTKKRHCVVRQLTVLERVAPTITGNLENQTTSIGESIEVSCTASGNPPPQIMWFKDNETLVEDSGIVLKDGNRNLTIRRVRKEDEGLYCQACSVLGCAKVEAFFIIEGAQEKTNLEIIILVGTTVIAMFFWLLLVIILGTV

SEQ ID NO: 446 - protein, 374 aa, Homo sapiens; identical to SEQ ID NO: 362

SEQ ID NO: 447 - protein, 360 aa, Homo sapiens
MLSTSRSRFIRNTNESGEEVTTFFDYDYGAPCHKFDVKQIGAQLLPPLYSLVFIFGFVGNMLVVLILINCKKLKCLTDIYLLNLAISDLLFLITLPLWAHSAANEWVFGNAMCKLFTGLYHIGYFGGIFFIILLTIDRYLAIVHAVFALKARTVTFGVVTSVITWLVAVFASVPGIIFTKCQKEDSVYVCGPYFPRGWNNFHTIMRNILGLVLPLLIMVICYSGILKTLLRCRNEKKRHRAVRVIFTIMIVYFLFWTPYNIVILLNTFQEFFGLSNCESTSQLDQATQVTETLGMTHCCINPIIYAFVGEKFRRYLSVFFRKHITKRFCKQCPVFYRETVDGVTSTNTPSTGEQEVSAGL

SEQ ID NO: 448 - protein, 352 aa, Homo sapiens [sequence omitted]

SEQ ID NO: 449 - protein, 152 aa, Homo sapiens; identical to SEQ ID NO: 280

SEQ ID NO: 450 - protein, 195 aa, Homo sapiens
DSQGVLSSFPAPQAVQDNPAMPTSSGSEGNVKLCSLEEAQRIWKQKSAEIYPIMDKSSRTRLALIICNEEFDSIPRRTGAEVDITGMTMLLQNLGYSVDVKKNLTASDMTTELEAFAHRPEHKTSDSTFLVFMSHGIREGICGKKHSEQVPDILQLNAIFNMLNTKNCPSLKDKPKVIIIQACRGDSPGVVWFKD

SEQ ID NO: 451 - protein, 178 aa, Homo sapiens
  MOD_RES (1)..(1): Asp or Asn
XPAMPTSSGSEGNVKLCSLEEAQRIWKQKSAEIYPIMDKSSRTRLALIICNEEFDSIPRRTGAEVDITGMTMLLQNLGYSVDVKKNLTASDMTTELEAFAHRPEHKTSDSTFLVFMSHGIREGICGKKHSEQVPDILQLNAIFNMLNTKNCPSLKDKPKVIIIQACRGDSPGVVWFKD

SEQ ID NO: 452 - protein, 86 aa, Homo sapiens
AIKKAHIEKDFIAFCSSTPDNVSWRHPTMGSVFIGRLIEHMQEYACSCDVEEIFRKVRFSFEQPGRAQMPTTERVTTRCFYLFPGH

SEQ ID NO: 453 - protein, 267 aa, Homo sapiens; identical to SEQ ID NO: 313

SEQ ID NO: 454 - protein, 208 aa, Homo sapiens
MTHLSLLGPLPCVRTSQQLPETQQVTTPGKKPVSVGRREVRVPGTALVPSLLSVSVSPAAPQYQGSPFSDPGFSAPELQLSSLPPATAFFKTWHALDDGERLSPRGPLTQHLQLVEDDQSDLNPGSPILPAQLGAARLRAQGPLGNMAAIMTALGLPIPPEEDTPGLAAFGASAFERKCRGYVVTREYGHWTDRAVRDLALLKAKYSA

SEQ ID NO: 455 - protein, 208 aa, Homo sapiens [sequence omitted]

SEQ ID NO: 456 - protein, 109 aa, Homo sapiens
MLKLTPLPSKMKVSAALLCLLLMAATFSPQGLAQPDSVSIPITCCFNVINRKIPIQRLESYTRITNIQCPKEAVIFKTKRGKEVCADPKERWVRDSMKHLDQIFQNLKP

SEQ ID NO: 457 - protein, 122 aa, Homo sapiens
MKPFHTALSFLILTTALGIWAQITHATETKEVQSSLKAQQGLEIEMFHMGFQDSSDCCLSYNSRIQCSRFIGYFPTSGGCTRPGIIFISKRGFQVCANPSDRRVQRCIERLEQNSQPRTYKQ

SEQ ID NO: 458 - protein, 131 aa, Homo sapiens
MARSLVCLGVIILLSAFSGPGVRGGPMPKLADRKLCADQECSHPISMAVALQDYMAPDCRFLTIHRGQVVYVFSKLKGRGRLFWGGSVQGDYYGDLAARLGYFPSSIVREDQTLKPGKVDVKTDKWDFYCQ

SEQ ID NO: 459 - protein, 120 aa, Homo sapiens
MKVSVAALSCLMLVTALGSQARVTKDAETEFMMSKLPLENPVLLDRFHATSADCCISYTPRSIPCSLLESYFETNSECSKPGVIFLTKKGRRFCANPSDKQVQVCVRMLKLDTRIKTRKN

SEQ ID NO: 460 - protein, 114 aa, Homo sapiens
MRLLILALLGICSLTAYIVEGVGSEVSHRRTCVSLTTQRLPVSRIKTYTITEGSLRAVIFITKRGLKVCADPQATWVRDVVRSMDRKSNTRNNMIQTKPTGTQQSTNTAVTLTG

SEQ ID NO: 461 - protein, 1255 aa, Homo sapiens
MTPGTQSPFFLLLLLTVLTVVTGSGHASSTPGGEKETSATQRSSVPSSTEKNAVSMTSSVLSSHSPGSGSSTTQGQDVTLAPATEPASGSAATWGQDVTSVPVTRPALGSTTPPAHDVTSAPDNKPAPGSTAPPAHGVTSAPDTRPAPGSTAPPAHGVTSAPDTRPAPGSTAPPAHGVTSAPDTRPAPGSTAPPAHGVTSAPDTRPAPGSTAPPAHGVTSAPDTRPAPGSTAPPAHGVTSAPDTRPAPGSTAPPAHGVTSAPDTRPAPGSTAPPAHGVTSAPDTRPAPGSTAPPAHGVTSAPDTRPAPGSTAPPAHGVTSAPDTRPAPGSTAPPAHGVTSAPDTRPAPGSTAPPAHGVTSAPDTRPAPGSTAPPAHGVTSAPDTRPAPGSTAPPAHGVTSAPDTRPAPGSTAPPAHGVTSAPDTRPAPGSTAPPAHGVTSAPDTRPAPGSTAPPAHGVTSAPDTRPAPGSTAPPAHGVTSAPDTRPAPGSTAPPAHGVTSAPDTRPAPGSTAPPAHGVTSAPDTRPAPGSTAPPAHGVTSAPDTRPAPGSTAPPAHGVTSAPDTRPAPGSTAPPAHGVTSAPDTRPAPGSTAPPAHGVTSAPDTRPAPGSTAPPAHGVTSAPDTRPAPGSTAPPAHGVTSAPDTRPAPGSTAPPAHGVTSAPDTRPAPGSTAPPAHGVTSAPDTRPAPGSTAPPAHGVTSAPDTRPAPGSTAPPAHGVTSAPDTRPAPGSTAPPAHGVTSAPDTRPAPGSTAPPAHGVTSAPDTRPAPGSTAPPAHGVTSAPDTRPAPGSTAPPAHGVTSAPDTRPAPGSTAPPAHGVTSAPDTRPAPGSTAPPAHGVTSAPDTRPAPGSTAPPAHGVTSAPDTRPAPGSTAPPAHGVTSAPDTRPAPGSTAPPAHGVTSAPDTRPAPGSTAPPAHGVTSAPDTRPAPGSTAPPAHGVTSAPDNRPALGSTAPPVHNVTSASGSASGSASTLVHNGTSARATTTPASKSTPFSIPSHHSDTPTTLASHSTKTDASSTHHSSVPPLTSSNHSTSPQLSTGVSFFFLSFHISNLQFNSSLEDPSTDYYQELQRDISEMFLQIYKQGGFLGLSNIKFRPGSVVVQLTLAFREGTINVHDVETQFNQYKTEAASRYNLTISDVSVSDVPFPFSAQSGAGVPGWGIALLVLVCVLVALAIVYLIALAVCQCRRKNYGQLDIFPARDTYHPMSEYPTYHTHGRYVPPSSTDRSPYEKVSAGNGGSSLSYTNPAVAATSANL

SEQ ID NO: 462 - protein, 478 aa, Human immunodeficiency virus
KLWVTVYYGVPVWKEATTTLFCASDARAYDTEVHNVWATHACVPTDPNPQEVVLGNVTENFNMWKNNMVEQMQEDIISLWDQSLKPCVKLTPLCVTLNCTDLGKATNTNSSNWKEEIKGEIKNCSFNITTSIRDKIQKENALFRNLDVVPIDNASTTTNYTNYRLIHCNRSVITQACPKVSFEPIPIHYCTPAGFAILKCNNKTFNGKGPCTNVSTVQCTHGIRPIVSTQLLLNGSLAEEEVVIRSDNFTNNAKTIIVQLNESVAINCTRPNNNTRKSIYIGPGRAFHTTGRIIGDIRKAHCNISRAQWNNTLEQIVKKLREQFGNNKTIVFNQSSGGDPEIVMHSFNCRGEFFYCNTTQLFNNTWRLNHTEGTKGNDTIILPCRIKQIINMWQEVGKAMYAPPIGGQISCSSNITGLLLTRDGGTNVTNDTEVFRPGGGDMRDNWRSELYKYKVIKIEPLGIAPTKAKRRVVQREKR

SEQ ID NO: 463 - protein, 94 aa, Homo sapiens; identical to SEQ ID NO: 363

SEQ ID NO: 464 - protein, 477 aa, Homo sapiens
LEHDNPEDDKVYFFFRENAIDGEHSGKATHARIGQICKNDFGGHRSLVNKWTTFLKARLICSVPGPNGIDTHFDELQDVFLMNFKDPKNPVVYGVFTTSSNIFKGSAVCMYSMSDVRRVFLGPYAHRDGPNYQWVPYQGRVPYPRPGTCPSKTFGGFDSTKDLPDDVITFARSHPAMYNPVFPMNNRPIVIKTDVNYQFTQIVVDRVDAEDGQYDVMFIGTDVGTVLKVVSIPKETWYDLEEVLLEEMTVFREPTAISAMELSTKQQQLYIGSTAGVAQLPLHRCDIYGKACAECCLARDPYCAWDGSACSRYFPTAKRRTRRQDIRNGDPLTHCSDLHHDNHHGHSPEERIIYGVENSSTFLECSPKSQRALVYWQFQRRNEERKEEIRVDDHIIRTDQGLLLRSLQQKDSGNYLCHAVEHGFIQTLLKVTLEVIDNEHLEELLHKDDDGHGSKTKEMSNSMTPSQKVWYRDFMQP

SEQ ID NO: 465 - protein, 241 aa, Homo sapiens; identical to SEQ ID NO: 254

SEQ ID NO: 466 - protein, 267 aa, Homo sapiens
MKAAVLTLAVLFLTGSQARHFWQQDEPPQSPWDRVKDLATVYVDVLKDSGRDYVSQFEGSALGKQLNLKLLDNWDSVTSTFSKLREQLGPVTQEFWDNLEKETEGLRQEMSKDLEEVKAKVQPYLDDFQKKWQEEMELYRQKVEPLRAELQEGARQKLHELQEKLSPLGEEMRDRARAHVDALRTHLAPYSDELRQRLAARLEALKENGGARLAEYHAKATEHLSTLSEKAKPALEDLRQGLLPVLESFKVSFLSALEEYTKKLNTQ

SEQ ID NO: 467 - DNA, 20 bp, Artificial Sequence
  Synthetic oligonucleotide
tgagcagaagtggctcagtg

SEQ ID NO: 468 - DNA, 20 bp, Artificial Sequence
  Synthetic oligonucleotide
tggctgtacagctacacccc

SEQ ID NO: 469 - DNA, 20 bp, Artificial Sequence
  Synthetic oligonucleotide
ttccactcctgcagggcccc

SEQ ID NO: 470 - DNA, 20 bp, Artificial Sequence
  Synthetic oligonucleotide
tcgcccttcagcccgcgttc

SEQ ID NO: 471 - protein, 7 aa, Homo sapiens
PKKKRKV

SEQ ID NO: 472 - protein, 16 aa, Homo sapiens
LGRVIPRKIASRASLM

SEQ ID NO: 473-485 - skipped (13 entries)

SEQ ID NO: 486 - protein, 786 aa, Homo sapiens
MAGLTAAAPRPGVLLLLLSILHPSRPGGVPGAIPGGVPGGVFYPGAGLGALGGGALGPGGKPLKPVPGGLAGAGLGAGLGAFPAVTFPGALVPGGVADAAAAYKAAKAGAGLGGVPGVGGLGVSAGAVVPQPGAGVKPGKVPGVGLPGVYPGGVLPGARFPGVGVLPGVPTGAGVKPKAPGVGGAFAGIPGVGPFGGPQPGVPLGYPIKAPKLPGGYGLPYTTGKLPYGYGPGGVAGAAGKAGYPTGTGVGPQAAAAAAAKAAAKFGAGAAGVLPGVGGAGVPGVPGAIPGIGGIAGVGTPAAAAAAAAAAKAAKYGAAAGLVPGGPGFGPGVVGVPGAGVPGVGVPGAGIPVVPGAGIPGAAVPGVVSPEAAAKAAAKAAKYGARPGVGVGGIPTYGVGAGGFPGFGVGVGGIPGVAGVPGVGGVPGVGGVPGVGISPEAQAAAAAKAAKYGAAGAGVLGGLVPGPQAAVPGVPGTGGVPGVGTPAAAAAKAAAKAAQFGLVPGVGVAPGVGVAPGVGVAPGVGLAPGVGVAPGVGVAPGVGVAPGIGPGGVAAAAKSAAKVAAKAQLRAAAGLGAGIPGLGVGVGVPGLGVGAGVPGLGVGAGVPGFGAGADEGVRRSLSPELREGDPSSSQHLPSTPSSPRVPGALAAAKAAKYGAAVPGVLGGLGALGGVGIPGGVVGAGPAAAAAAAKAAAKAAQFGLVGAAGLGGLGVGGLGVPGVGGLGGIPPAAAAKAAKYGAAGLGGVLGGAGQFPLGGVAARPGFGLSPIFPGGACLGKACGRKRK

SEQ ID NO: 487 - protein, 1464 aa, Homo sapiens
MFSFVDLRLLLLLAATALLTHGQEEGQVEGQDEDIPPITCVQNGLRYHDRDVWKPEPCRICVCDNGKVLCDDVICDETKNCPGAEVPEGECCPVCPDGSESPTDQETTGVEGPKGDTGPRGPRGPAGPPGRDGIPGQPGLPGPPGPPGPPGPPGLGGNFAPQLSYGYDEKSTGGISVPGPMGPSGPRGLPGPPGAPGPQGFQGPPGEPGEPGASGPMGPRGPPGPPGKNGDDGEAGKPGRPGERGPPGPQGARGLPGTAGLPGMKGHRGFSGLDGAKGDAGPAGPKGEPGSPGENGAPGQMGPRGLPGERGRPGAPGPAGARGNDGATGAAGPPGPTGPAGPPGFPGAVGAKGEAGPQGPRGSEGPQGVRGEPGPPGPAGAAGPAGNPGADGQPGAKGANGAPGIAGAPGFPGARGPSGPQGPGGPPGPKGNSGEPGAPGSKGDTGAKGEPGPVGVQGPPGPAGEEGKRGARGEPGPTGLPGPPGERGGPGSRGFPGADGVAGPKGPAGERGSPGPAGPKGSPGEAGRPGEAGLPGAKGLTGSPGSPGPDGKTGPPGPAGQDGRPGPPGPPGARGQAGVMGFPGPKGAAGEPGKAGERGVPGPPGAVGPAGKDGEAGAQGPPGPAGPAGERGEQGPAGSPGFQGLPGPAGPPGEAGKPGEQGVPGDLGAPGPSGARGERGFPGERGVQGPPGPAGPRGANGAPGNDGAKGDAGAPGAPGSQGAPGLQGMPGERGAAGLPGPKGDRGDAGPKGADGSPGKDGVRGLTGPIGPPGPAGAPGDKGESGPSGPAGPTGARGAPGDRGEPGPPGPAGFAGPPGADGQPGAKGEPGDAGAKGDAGPPGPAGPAGPPGPIGNVGAPGAKGARGSAGPPGATGFPGAAGRVGPPGPSGNAGPPGPPGPAGKEGGKGPRGETGPAGRPGEVGPPGPPGPAGEKGSPGADGPAGAPGTPGPQGIAGQRGVVGLPGQRGERGFPGLPGPSGEPGKQGPSGASGERGPPGPMGPPGLAGPPGESGREGAPGAEGSPGRDGSPGAKGDRGETGPAGPPGAPGAPGAPGPVGPAGKSGDRGETGPAGPTGPVGPVGARGPAGPQGPRGDKGETGEQGDRGIKGHRGFSGLQGPPGPPGSPGEQGPSGASGPAGPRGPPGSAGAPGKDGLNGLPGPIGPPGPRGRTGDAGPVGPPGPPGPPGPPGPPSAGFDFSFLPQPPQEKAHDGGRYYRADDANVVRDRDLEVDTTLKSLSQQIENIRSPEGSRKNPARTCRDLKMCHSDWKSGEYWIDPNQGCNLDAIKVFCNMETGETCVYPTQPSVAQKNWYISKNPKDKRHVWFGESMTDGFQFEYGGQGSDPADVAIQLTFLRLMSTEASQNITYHCKNSVAYMDQQTGNLKKALLLQGSNEIEIRAEGNSRFTYSVTVDGCTSHTGAWGKTVIEYKTTKTSRLPIIDVAPLDVGAPDQEFGFDVGPVCFL

SEQ ID NO: 488 - protein, 1366 aa, Homo sapiens
MLSFVDTRTLLLLAVTLCLATCQSLQEETVRKGPAGDRGPRGERGPPGPPGRDGEDGPTGPPGPPGPPGPPGLGGNFAAQYDGKGVGLGPGPMGLMGPRGPPGAAGAPGPQGFQGPAGEPGEPGQTGPAGARGPAGPPGKAGEDGHPGKPGRPGERGVVGPQGARGFPGTPGLPGFKGIRGHNGLDGLKGQPGAPGVKGEPGAPGENGTPGQTGARGLPGERGRVGAPGPAGARGSDGSVGPVGPAGPIGSAGPPGFPGAPGPKGEIGAVGNAGPAGPAGPRGEVGLPGLSGPVGPPGNPGANGLTGAKGAAGLPGVAGAPGLPGPRGIPGPVGAAGATGARGLVGEPGPAGSKGESGNKGEPGSAGPQGPPGPSGEEGKRGPNGEAGSAGPPGPPGLRGSPGSRGLPGADGRAGVMGPPGSRGASGPAGVRGPNGDAGRPGEPGLMGPRGLPGSPGNIGPAGKEGPVGLPGIDGRPGPIGPAGARGEPGNIGFPGPKGPTGDPGKNGDKGHAGLAGARGAPGPDGNNGAQGPPGPQGVQGGKGEQGPPGPPGFQGLPGPSGPAGEVGKPGERGLHGEFGLPGPAGPRGERGPPGESGAAGPTGPIGSRGPSGPPGPDGNKGEPGVVGAVGTAGPSGPSGLPGERGAAGIPGGKGEKGEPGLRGEIGNPGRDGARGAPGAVGAPGPAGATGDRGEAGAAGPAGPAGPRGSPGERGEVGPAGPNGFAGPAGAAGQPGAKGERGAKGPKGENGVVGPTGPVGAAGPAGPNGPPGPAGSRGDGGPPGMTGFPGAAGRTGPPGPSGISGPPGPPGPAGKEGLRGPRGDQGPVGRTGEVGAVGPPGFAGEKGPSGEAGTAGPPGTPGPQGLLGAPGILGLPGSRGERGLPGVAGAVGEPGPLGIAGPPGARGPPGAVGSPGVNGAPGEAGRDGNPGNDGPPGRDGQPGHKGERGYPGNIGPVGAAGAPGPHGPVGPAGKHGNRGETGPSGPVGPAGAVGPRGPSGPQGIRGDKGEPGEKGPRGLPGLKGHNGLQGLPGIAGHHGDQGAPGSVGPAGPRGPAGPSGPAGKDGRTGHPGTVGPAGIRGPQGHQGPAGPPGPPGPPGPPGVSGGGYDFGYDGDFYRADQPRSAPSLRPKDYEVDATLKSLNNQIETLLTPEGSRKNPARTCRDLRLSHPEWSSGYYWIDPNQGCTMDAIKVYCDFSTGETCIRAQPENIPAKNWYRSSKDKKHVWLGETINAGSQFEYNVEGVTSKEMATQLAFMRLLANYASQNITYHCKNSIAYMDEETGNLKKAVILQGSNDVELVAEGNSRFTYTVLVDGCSKKTNEWGKTIIEYKTNKPSRLPFLDIAPLDIGGADQEFFVDIGPVCFK

SEQ ID NO: 489 - protein, 1466 aa, Homo sapiens
MMSFVQKGSWLLLALLHPTIILAQQEAVEGGCSHLGQSYADRDVWKPEPCQICVCDSGSVLCDDIICDDQELDCPNPEIPFGECCAVCPQPPTAPTRPPNGQGPQGPKGDPGPPGIPGRNGDPGIPGQPGSPGSPGPPGICESCPTGPQNYSPQYDSYDVKSGVAVGGLAGYPGPAGPPGPPGPPGTSGHPGSPGSPGYQGPPGEPGQAGPSGPPGPPGAIGPSGPAGKDGESGRPGRPGERGLPGPPGIKGPAGIPGFPGMKGHRGFDGRNGEKGETGAPGLKGENGLPGENGAPGPMGPRGAPGERGRPGLPGAAGARGNDGARGSDGQPGPPGPPGTAGFPGSPGAKGEVGPAGSPGSNGAPGQRGEPGPQGHAGAQGPPGPPGINGSPGGKGEMGPAGIPGAPGLMGARGPPGPAGANGAPGLRGGAGEPGKNGAKGEPGPRGERGEAGIPGVPGAKGEDGKDGSPGEPGANGLPGAAGERGAPGFRGPAGPNGIPGEKGPAGERGAPGPAGPRGAAGEPGRDGVPGGPGMRGMPGSPGGPGSDGKPGPPGSQGESGRPGPPGPSGPRGQPGVMGFPGPKGNDGAPGKNGERGGPGGPGPQGPPGKNGETGPQGPPGPTGPGGDKGDTGPPGPQGLQGLPGTGGPPGENGKPGEPGPKGDAGAPGAPGGKGDAGAPGERGPPGLAGAPGLRGGAGPPGPEGGKGAAGPPGPPGAAGTPGLQGMPGERGGLGSPGPKGDKGEPGGPGADGVPGKDGPRGPTGPIGPPGPAGQPGDKGEGGAPGLPGIAGPRGSPGERGETGPPGPAGFPGAPGQNGEPGGKGERGAPGEKGEGGPPGVAGPPGGSGPAGPPGPQGVKGERGSPGGPGAAGFPGARGLPGPPGSNGNPGPPGPSGSPGKDGPPGPAGNTGAPGSPGVSGPKGDAGQPGEKGSPGAQGPPGAPGPLGIAGITGARGLAGPPGMPGPRGSPGPQGVKGESGKPGANGLSGERGPPGPQGLPGLAGTAGEPGRDGNPGSDGLPGRDGSPGGKGDRGENGSPGAPGAPGHPGPPGPVGPAGKSGDRGESGPAGPAGAPGPAGSRGAPGPQGPRGDKGETGERGAAGIKGHRGFPGNPGAPGSPGPAGQQGAIGSPGPAGPRGPVGPSGPPGKDGTSGHPGPIGPPGPRGNRGERGSEGSPGHPGQPGPPGPPGAPGPCCGGVGAAAIAGIGGEKAGGFAPYYGDEPMDFKINTDEIMTSLKSVNGQIESLISPDGSRKNPARNCRDLKFCHPELKSGEYWVDPNQGCKLDAIKVFCNMETGETCISANPLNVPRKHWWTDSSAEKKHVWFGESMDGGFQFSYGNPELPEDVLDVHLAFLRLLSSRASQNITYHCKNSIAYMDQASGNVKKALKLMGSNEGEFKAEGNSKFTYTVLEDGCTKHTGEWSKTVFEYRTRKAVRLPIVDIAPYDIGGPDQEFGVDVGPVCFL

SEQ ID NO: 490 - protein, 2944 aa, Homo sapiens
MTLRLLVAALCAGILAEAPRVRAQHRERVTCTRLYAADIVFLLDGSSSIGRSNFREVRSFLEGLVLPFSGAASAQGVRFATVQYSDDPRTEFGLDALGSGGDVIRAIRELSYKGGNTRTGAAILHVADHVFLPQLARPGVPKVCILITDGKSQDLVDTAAQRLKGQGVKLFAVGIKNADPEELKRVASQPTSDFFFFVNDFSILRTLLPLVSRRVCTTAGGVPVTRPPDDSTSAPRDLVLSEPSSQSLRVQWTAASGPVTGYKVQYTPLTGLGQPLPSERQEVNVPAGETSVRLRGLRPLTEYQVTVIALYANSIGEAVSGTARTTALEGPELTIQNTTAHSLLVAWRSVPGATGYRVTWRVLSGGPTQQQELGPGQGSVLLRDLEPGTDYEVTVSTLFGRSVGPATSLMARTDASVEQTLRPVILGPTSILLSWNLVPEARGYRLEWRRETGLEPPQKVVLPSDVTRYQLDGLQPGTEYRLTLYTLLEGHEVATPATVVPTGPELPVSPVTDLQATELPGQRVRVSWSPVPGATQYRIIVRSTQGVERTLVLPGSQTAFDLDDVQAGLSYTVRVSARVGPREGSASVLTVRREPETPLAVPGLRVVVSDATRVRVAWGPVPGASGFRISWSTGSGPESSQTLPPDSTATDITGLQPGTTYQVAVSVLRGREEGPAAVIVARTDPLGPVRTVHVTQASSSSVTITWTRVPGATGYRVSWHSAHGPEKSQLVSGEATVAELDGLEPDTEYTVHVRAHVAGVDGPPASVVVRTAPEPVGRVSRLQILNASSDVLRITWVGVTGATAYRLAWGRSEGGPMRHQILPGNTDSAEIRGLEGGVSYSVRVTALVGDREGTPVSIVVTTPPEAPPALGTLHVVQRGEHSLRLRWEPVPRAQGFLLHWQPEGGQEQSRVLGPELSSYHLDGLEPATQYRVRLSVLGPAGEGPSAEVTARTESPRVPSIELRVVDTSIDSVTLAWTPVSRASSYILSWRPLRGPGQEVPGSPQTLPGISSSQRVTGLEPGVSYIFSLTPVLDGVRGPEASVTQTPVCPRGLADVVFLPHATQDNAHRAEATRRVLERLVLALGPLGPQAVQVGLLSYSHRPSPLFPLNGSHDLGIILQRIRDMPYMDPSGNNLGTAVVTAHRYMLAPDAPGRRQHVPGVMVLLVDEPLRGDIFSPIREAQASGLNVVMLGMAGADPEQLRRLAPGMDSVQTFFAVDDGPSLDQAVSGLATALCQASFTTQPRPEPCPVYCPKGQKGEPGEMGLRGQVGPPGDPGLPGRTGAPGPQGPPGSATAKGERGFPGADGRPGSPGRAGNPGTPGAPGLKGSPGLPGPRGDPGERGPRGPKGEPGAPGQVIGGEGPGLPGRKGDPGPSGPPGPRGPLGDPGPRGPPGLPGTAMKGDKGDRGERGPPGPGEGGIAPGEPGLPGLPGSPGPQGPVGPPGKKGEKGDSEDGAPGLPGQPGSPGEQGPRGPPGAIGPKGDRGFPGPLGEAGEKGERGPPGPAGSRGLPGVAGRPGAKGPEGPPGPTGRQGEKGEPGRPGDPAVVGPAVAGPKGEKGDVGPAGPRGATGVQGERGPPGLVLPGDPGPKGDPGDRGPIGLTGRAGPPGDSGPPGEKGDPGRPGPPGPVGPRGRDGEVGEKGDEGPPGDPGLPGKAGERGLRGAPGVRGPVGEKGDQGDPGEDGRNGSPGSSGPKGDRGEPGPPGPPGRLVDTGPGAREKGEPGDRGQEGPRGPKGDPGLPGAPGERGIEGFRGPPGPQGDPGVRGPAGEKGDRGPPGLDGRSGLDGKPGAAGPSGPNGAAGKAGDPGRDGLPGLRGEQGLPGPSGPPGLPGKPGEDGKPGLNGKNGEPGDPGEDGRKGEKGDSGASGREGRDGPKGERGAPGILGPQGPPGLPGPVGPPGQGFPGVPGGTGPKGDRGETGSKGEQGLPGERGLRGEPGSVPNVDRLLETAGIKASALREIVETWDESSGSFLPVPERRRGPKGDSGEQGPPGKEGPIGFPGERGLKGDRGDPGPQGPPGLALGERGPPGPSGLAGEPGKPGIPGLPGRAGGVGEAGRPGERGERGEKGERGEQGRDGPPGLPGTPGPPGPPGPKVSVDEPGPGLSGEQGPPGLKGAKGEPGSNGDQGPKGDRGVPGIKGDRGEPGPRGQDGNPGLPGERGMAGPEGKPGLQGPRGPPGPVGGHGDPGPPGAPGLAGPAGPQGPSGLKGEPGETGPPGRGLTGPTGAVGLPGPPGPSGLVGPQGSPGLPGQVGETGKPGAPGRDGASGKDGDRGSPGVPGSPGLPGPVGPKGEPGPTGAPGQAVVGLPGAKGEKGAPGGLAGDLVGEPGAKGDRGLPGPRGEKGEAGRAGEPGDPGEDGQKGAPGPKGFKGDPGVGVPGSPGPPGPPGVKGDLGLPGLPGAPGVVGFPGQTGPRGEMGQPGPSGERGLAGPPGREGIPGPLGPPGPPGSVGPPGASGLKGDKGDPGVGLPGPRGERGEPGIRGEDGRPGQEGPRGLTGPPGSRGERGEKGDVGSAGLKGDKGDSAVILGPPGPRGAKGDMGERGPRGLDGDKGPRGDNGDPGDKGSKGEPGDKGSAGLPGLRGLLGPQGQPGAAGIPGDPGSPGKDGVPGIRGEKGDVGFMGPRGLKGERGVKGACGLDGEKGDKGEAGPPGRPGLAGHKGEMGEPGVPGQSGAPGKEGLIGPKGDRGFDGQPGPKGDQGEKGERGTPGIGGFPGPSGNDGSAGPPGPPGSVGPRGPEGLQGQKGERGPPGERVVGAPGVPGAPGERGEQGRPGPAGPRGEKGEAALTEDDIRGFVRQEMSQHCACQGQFIASGSRPLPSYAADTAGSQLHAVPVLRVSHAEEEERVPPEDDEYSEYSEYSVEEYQDPEAPWDSDDPCSLPLDEGSCTAYTLRWYHRAVTGSTEACHPFVYGGCGGNANRFGTREACERRCPPRVVQSQGTGTAQD

SEQ ID NO: 491 - protein, 529 aa, Homo sapiens [sequence omitted]

SEQ ID NO: 492 - protein, 1669 aa, Homo sapiens
MGPRLSVWLLLLPAALLLHEEHSRAAAKGGCAGSGCGKCDCHGVKGQKGERGLPGLQGVIGFPGMQGPEGPQGPPGQKGDTGEPGLPGTKGTRGPPGASGYPGNPGLPGIPGQDGPPGPPGIPGCNGTKGERGPLGPPGLPGFAGNPGPPGLPGMKGDPGEILGHVPGMLLKGERGFPGIPGTPGPPGLPGLQGPVGPPGFTGPPGPPGPPGPPGEKGQMGLSFQGPKGDKGDQGVSGPPGVPGQAQVQEKGDFATKGEKGQKGEPGFQGMPGVGEKGEPGKPGPRGKPGKDGDKGEKGSPGFPGEPGYPGLIGRQGPQGEKGEAGPPGPPGIVIGTGPLGEKGERGYPGTPGPRGEPGPKGFPGLPGQPGPPGLPVPGQAGAPGFPGERGEKGDRGFPGTSLPGPSGRDGLPGPPGSPGPPGQPGYTNGIVECQPGPPGDQGPPGIPGQPGFIGEIGEKGQKGESCLICDIDGYRGPPGPQGPPGEIGFPGQPGAKGDRGLPGRDGVAGVPGPQGTPGLIGQPGAKGEPGEFYFDLRLKGDKGDPGFPGQPGMTGRAGSPGRDGHPGLPGPKGSPGSVGLKGERGPPGGVGFPGSRGDTGPPGPPGYGPAGPIGDKGQAGFPGGPGSPGLPGPKGEPGKIVPLPGPPGAEGLPGSPGFPGPQGDRGFPGTPGRPGLPGEKGAVGQPGIGFPGPPGPKGVDGLPGDMGPPGTPGRPGFNGLPGNPGVQGQKGEPGVGLPGLKGLPGLPGIPGTPGEKGSIGVPGVPGEHGAIGPPGLQGIRGEPGPPGLPGSVGSPGVPGIGPPGARGPPGGQGPPGLSGPPGIKGEKGFPGFPGLDMPGPKGDKGAQGLPGITGQSGLPGLPGQQGAPGIPGFPGSKGEMGVMGTPGQPGSPGPVGAPGLPGEKGDHGFPGSSGPRGDPGLKGDKGDVGLPGKPGSMDKVDMGSMKGQKGDQGEKGQIGPIGEKGSRGDPGTPGVPGKDGQAGQPGQPGPKGDPGISGTPGAPGLPGPKGSVGGMGLPGTPGEKGVPGIPGPQGSPGLPGDKGAKGEKGQAGPPGIGIPGLRGEKGDQGIAGFPGSPGEKGEKGSIGIPGMPGSPGLKGSPGSVGYPGSPGLPGEKGDKGLPGLDGIPGVKGEAGLPGTPGPTGPAGQKGEPGSDGIPGSAGEKGEPGLPGRGFPGFPGAKGDKGSKGEVGFPGLAGSPGIPGSKGEQGFMGPPGPQGQPGLPGSPGHATEGPKGDRGPQGQPGLPGLPGPMGPPGLPGIDGVKGDKGNPGWPGAPGVPGPKGDPGFQGMPGIGGSPGITGSKGDMGPPGVPGFQGPKGLPGLQGIKGDQGDQGVPGAKGLPGPPGPPGPYDIIKGEPGLPGPEGPPGLKGLQGLPGPKGQQGVTGLVGIPGPPGIPGFDGAPGQKGEMGPAGPTGPRGFPGPPGPDGLPGSMGPPGTPSVDHGFLVTRHSQTIDDPQCPSGTKILYHGYSLLYVQGNERAHGQDLGTAGSCLRKFSTMPFLFCNINNVCNFASRNDYSYWLSTPEPMPMSMAPITGENIRPFISRCAVCEAPAMVMAVHSQTIQIPPCPSGWSSLWIGYSFVMHTSAGAEGSGQALASPGSCLEEFRSAPFIECHGRGTCNYYANAYSFWLATIERSEMFKKPTPSTLKAGELRTHVSRCQVCMRRT

SEQ ID NO: 493 - protein, 1712 aa, Homo sapiens
MGRDQRAVAGPALRRWLLLGTVTVGFLAQSVLAGVKKFDVPCGGRDCSGGCQCYPEKGGRGQPGPVGPQGYNGPPGLQGFPGLQGRKGDKGERGAPGVTGPKGDVGARGVSGFPGADGIPGHPGQGGPRGRPGYDGCNGTQGDSGPQGPPGSEGFTGPPGPQGPKGQKGEPYALPKEERDRYRGEPGEPGLVGFQGPPGRPGHVGQMGPVGAPGRPGPPGPPGPKGQQGNRGLGFYGVKGEKGDVGQPGPNGIPSDTLHPIIAPTGVTFHPDQYKGEKGSEGEPGIRGISLKGEEGIMGFPGLRGYPGLSGEKGSPGQKGSRGLDGYQGPDGPRGPKGEAGDPGPPGLPAYSPHPSLAKGARGDPGFPGAQGEPGSQGEPGDPGLPGPPGLSIGDGDQRRGLPGEMGPKGFIGDPGIPALYGGPPGPDGKRGPPGPPGLPGPPGPDGFLFGLKGAKGRAGFPGLPGSPGARGPKGWKGDAGECRCTEGDEAIKGLPGLPGPKGFAGINGEPGRKGDRGDPGQHGLPGFPGLKGVPGNIGAPGPKGAKGDSRTITTKGERGQPGVPGVPGMKGDDGSPGRDGLDGFPGLPGPPGDGIKGPPGDPGYPGIPGTKGTPGEMGPPGLGLPGLKGQRGFPGDAGLPGPPGFLGPPGPAGTPGQIDCDTDVKRAVGGDRQEAIQPGCIGGPKGLPGLPGPPGPTGAKGLRGIPGFAGADGGPGPRGLPGDAGREGFPGPPGFIGPRGSKGAVGLPGPDGSPGPIGLPGPDGPPGERGLPGEVLGAQPGPRGDAGVPGQPGLKGLPGDRGPPGFRGSQGMPGMPGLKGQPGLPGPSGQPGLYGPPGLHGFPGAPGQEGPLGLPGIPGREGLPGDRGDPGDTGAPGPVGMKGLSGDRGDAGFTGEQGHPGSPGFKGIDGMPGTPGLKGDRGSPGMDGFQGMPGLKGRPGFPGSKGEAGFFGIPGLKGLAGEPGFKGSRGDPGPPGPPPVILPGMKDIKGEKGDEGPMGLKGYLGAKGIQGMPGIPGLSGIPGLPGRPGHIKGVKGDIGVPGIPGLPGFPGVAGPPGITGFPGFIGSRGDKGAPGRAGLYGEIGATGDFGDIGDTINLPGRPGLKGERGTTGIPGLKGFFGEKGTEGDIGFPGITGVTGVQGPPGLKGQTGFPGLTGPPGSQGELGRIGLPGGKGDDGWPGAPGLPGFPGLRGIRGLHGLPGTKGFPGSPGSDIHGDPGFPGPPGERGDPGEANTLPGPVGVPGQKGDQGAPGERGPPGSPGLQGFPGITPPSNISGAPGDKGAPGIFGLKGYRGPPGPPGSAALPGSKGDTGNPGAPGTPGTKGWAGDSGPQGRPGVFGLPGEKGPRGEQGFMGNTGPTGAVGDRGPKGPKGDPGFPGAPGTVGAPGIAGIPQKIAVQPGTVGPQGRRGPPGAPGEMGPQGPPGEPGFRGAPGKAGPQGRGGVSAVPGFRGDEGPIGHQGPIGQEGAPGRPGSPGLPGMPGRSVSIGYLLVKHSQTDQEPMCPVGMNKLWSGYSLLYFEGQEKAHNQDLGLAGSCLARFSTMPFLYCNPGDVCYYASRNDKSYWLSTTAPLPMMPVAEDEIKPYISRCSVCEAPAIAIAVHSQDVSIPHCPAGWRSLWIGYSFLMHTAAGDEGGGQSLVSPGSCLEDFRATPFIECNGGRGTCHYYANKYSFWLTTIPEQSFQGSPSADTLKAGLIRTHISRCQVCMKNL

SEQ ID NO: 494 - protein, 1670 aa, Homo sapiens
MSARTAPRPQVLLLPLLLVLLAAAPAASKGCVCKDKGQCFCDGAKGEKGEKGFPGPPGSPGQKGFTGPEGLPGPQGPKGFPGLPGLTGSKGVRGISGLPGFSGSPGLPGTPGNTGPYGLVGVPGCSGSKGEQGFPGLPGTLGYPGIPGAAGLKGQKGAPAKEEDIELDAKGDPGLPGAPGPQGLPGPPGFPGPVGPPGPPGFFGFPGAMGPRGPKGHMGERVIGHKGERGVKGLTGPPGPPGTVIVTLTGPDNRTDLKGEKGDKGAMGEPGPPGPSGLPGESYGSEKGAPGDPGLQGKPGKDGVPGFPGSEGVKGNRGFPGLMGEDGIKGQKGDIGPPGFRGPTEYYDTYQEKGDEGTPGPPGPRGARGPQGPSGPPGVPGSPGSSRPGLRGAPGWPGLKGSKGERGRPGKDAMGTPGSPGCAGSPGLPGSPGPPGPPGDIVFRKGPPGDHGLPGYLGSPGIPGVDGPKGEPGLLCTQCPYIPGPPGLPGLPGLHGVKGIPGRQGAAGLKGSPGSPGNTGLPGFPGFPGAQGDPGLKGEKGETLQPEGQVGVPGDPGLRGQPGRKGLDGIPGTPGVKGLPGPKGELALSGEKGDQGPPGDPGSPGSPGPAGPAGPPGYGPQGEPGLQGTQGVPGAPGPPGEAGPRGELSVSTPVPGPPGPPGPPGHPGPQGPPGIPGSLGKCGDPGLPGPDGEPGIPGIGFPGPPGPKGDQGFPGTKGSLGCPGKMGEPGLPGKPGLPGAKGEPAVAMPGGPGTPGFPGERGNSGEHGEIGLPGLPGLPGTPGNEGLDGPRGDPGQPGPPGEQGPPGRCIEGPRGAQGLPGLNGLKGQQGRRGKTGPKGDPGIPGLDRSGFPGETGSPGIPGHQGEMGPLGQRGYPGNPGILGPPGEDGVIGMMGFPGAIGPPGPPGNPGTPGQRGSPGIPGVKGQRGTPGAKGEQGDKGNPGPSEISHVIGDKGEPGLKGFAGNPGEKGNRGVPGMPGLKGLKGLPGPAGPPGPRGDLGSTGNPGEPGLRGIPGSMGNMGMPGSKGKRGTLGFPGRAGRPGLPGIHGLQGDKGEPGYSEGTRPGPPGPTGDPGLPGDMGKKGEMGQPGPPGHLGPAGPEGAPGSPGSPGLPGKPGPHGDLGFKGIKGLLGPPGIRGPPGLPGFPGSPGPMGIRGDQGRDGIPGPAGEKGETGLLRAPPGPRGNPGAQGAKGDRGAPGFPGLPGRKGAMGDAGPRGPTGIEGFPGPPGLPGAIIPGQTGNRGPPGSRGSPGAPGPPGPPGSHVIGIKGDKGSMGHPGPKGPPGTAGDMGPPGRLGAPGTPGLPGPRGDPGFQGFPGVKGEKGNPGFLGSIGPPGPIGPKGPPGVRGDPGTLKIISLPGSPGPPGTPGEPGMQGEPGPPGPPGNLGPCGPRGKPGKDGKPGTPGPAGEKGNKGSKGEPGPAGSDGLPGLKGKRGDSGSPATWTTRGFVFTRHSQTTAIPSCPEGTVPLYSGFSFLFVQGNQRAHGQDLGTLGSCLQRFTTMPFLFCNVNDVCNFASRNDYSYWLSTPALMPMNMAPITGRALEPYISRCTVCEGPAIAIAVHSQTTDIPPCPHGWISLWKGFSFIMFTSAGSEGTGQALASPGSCLEEFRASPFLECHGRGTCNYYSNSYSFWLASLNPERMFRKPIPSTVKAGELEKIISRCQVCMKKRH

SEQ ID NO: 495 - protein, 1690 aa, Homo sapiens
MWSLHIVLMRCSFRLTKSLATGPWSLILILFSVQYVYGSGKKYIGPCGGRDCSVCHCVPEKGSRGPPGPPGPQGPIGPLGAPGPIGLSGEKGMRGDRGPPGAAGDKGDKGPTGVPGFPGLDGIPGHPGPPGPRGKPGMSGHNGSRGDPGFPGGRGALGPGGPLGHPGEKGEKGNSVFILGAVKGIQGDRGDPGLPGLPGSWGAGGPAGPTGYPGEPGLVGPPGQPGRPGLKGNPGVGVKGQMGDPGEVGQQGSPGPTLLVEPPDFCLYKGEKGIKGIPGMVGLPGPPGRKGESGIGAKGEKGIPGFPGPRGDPGSYGSPGFPGLKGELGLVGDPGLFGLIGPKGDPGNRGHPGPPGVLVTPPLPLKGPPGDPGFPGRYGETGDVGPPGPPGLLGRPGEACAGMIGPPGPQGFPGLPGLPGEAGIPGRPDSAPGKPGKPGSPGLPGAPGLQGLPGSSVIYCSVGNPGPQGIKGKVGPPGGRGPKGEKGNEGLCACEPGPMGPPGPPGLPGRQGSKGDLGLPGWLGTKGDPGPPGAEGPPGLPGKHGASGPPGNKGAKGDMVVSRVKGHKGERGPDGPPGFPGQPGSHGRDGHAGEKGDPGPPGDHEDATPGGKGFPGPLGPPGKAGPVGPPGLGFPGPPGERGHPGVPGHPGVRGPDGLKGQKGDTISCNVTYPGRHGPPGFDGPPGPKGFPGPQGAPGLSGSDGHKGRPGTPGTAEIPGPPGFRGDMGDPGFGGEKGSSPVGPPGPPGSPGVNGQKGIPGDPAFGHLGPPGKRGLSGVPGIKGPRGDPGCPGAEGPAGIPGFLGLKGPKGREGHAGFPGVPGPPGHSCERGAPGIPGQPGLPGYPGSPGAPGGKGQPGDVGPPGPAGMKGLPGLPGRPGAHGPPGLPGIPGPFGDDGLPGPPGPKGPRGLPGFPGFPGERGKPGAEGCPGAKGEPGEKGMSGLPGDRGLRGAKGAIGPPGDEGEMAIISQKGTPGEPGPPGDDGFPGERGDKGTPGMQGRRGEPGRYGPPGFHRGEPGEKGQPGPPGPPGPPGSTGLRGFIGFPGLPGDQGEPGSPGPPGFSGIDGARGPKGNKGDPASHFGPPGPKGEPGSPGCPGHFGASGEQGLPGIQGPRGSPGRPGPPGSSGPPGCPGDHGMPGLRGQPGEMGDPGPRGLQGDPGIPGPPGIKGPSGSPGLNGLHGLKGQKGTKGASGLHDVGPPGPVGIPGLKGERGDPGSPGISPPGPRGKKGPPGPPGSSGPPGPAGATGRAPKDIPDPGPPGDQGPPGPDGPRGAPGPPGLPGSVDLLRGEPGDCGLPGPPGPPGPPGPPGYKGFPGCDGKDGQKGPVGFPGPQGPHGFPGPPGEKGLPGPPGRKGPTGLPGPRGEPGPPADVDDCPRIPGLPGAPGMRGPEGAMGLPGMRGPSGPGCKGEPGLDGRRGVDGVPGSPGPPGRKGDTGEDGYPGGPGPPGPIGDPGPKGFGPGYLGGFLLVLHSQTDQEPTCPLGMPRLWTGYSLLYLEGQEKAHNQDLGLAGSCLPVFSTLPFAYCNIHQVCHYAQRNDRSYWLASAAPLPMMPLSEEAIRPYVSRCAVCEAPAQAVAVHSQDQSIPPCPQTWRSLWIGYSFLMHTGAGDQGGGQALMSPGSCLEDFRAAPFLECQGRQGTCHFFANKYSFWLTTVKADLQFSSAPAPDTLKESQAQRQKISRCQVCVKYS

SEQ ID NO: 496 - protein, 1685 aa, Homo sapiens
MKLRGVSLAAGLFLLALSLWGQPAEAAACYGCSPGSKCDCSGIKGEKGERGFPGLEGHPGLPGFPGPEGPPGPRGQKGDDGIPGPPGPKGIRGPPGLPGFPGTPGLPGMPGHDGAPGPQGIPGCNGTKGERGFPGSPGFPGLQGPPGPPGIPGMKGEPGSIIMSSLPGPKGNPGYPGPPGIQGLPGPTGIPGPIGPPGPPGLMGPPGPPGLPGPKGNMGLNFQGPKGEKGEQGLQGPPGPPGQISEQKRPIDVEFQKGDQGLPGDRGPPGPPGIRGPPGPPGGEKGEKGEQGEPGKRGKPGKDGENGQPGIPGLPGDPGYPGEPGRDGEKGQKGDTGPPGPPGLVIPRPGTGITIGEKGNIGLPGLPGEKGERGFPGIQGPPGLPGPPGAAVMGPPGPPGFPGERGQKGDEGPPGISIPGPPGLDGQPGAPGLPGPPGPAGPHIPPSDEICEPGPPGPPGSPGDKGLQGEQGVKGDKGDTCFNCIGTGISGPPGQPGLPGLPGPPGSLGFPGQKGEKGQAGATGPKGLPGIPGAPGAPGFPGSKGEPGDILTFPGMKGDKGELGSPGAPGLPGLPGTPGQDGLPGLPGPKGEPGGITFKGERGPPGNPGLPGLPGNIGPMGPPGFGPPGPVGEKGIQGVAGNPGQPGIPGPKGDPGQTITQPGKPGLPGNPGRDGDVGLPGDPGLPGQPGLPGIPGSKGEPGIPGIGLPGPPGPKGFPGIPGPPGAPGTPGRIGLEGPPGPPGFPGPKGEPGFALPGPPGPPGLPGFKGALGPKGDRGFPGPPGPPGRTGLDGLPGPKGDVGPNGQPGPMGPPGLPGIGVQGPPGPPGIPGPIGQPGLHGIPGEKGDPGPPGLDVPGPPGERGSPGIPGAPGPIGPPGSPGLPGKAGASGFPGTKGEMGMMGPPGPPGPLGIPGRSGVPGLKGDDGLQGQPGLPGPTGEKGSKGEPGLPGPPGPMDPNLLGSKGEKGEPGLPGIPGVSGPKGYQGLPGDPGQPGLSGQPGLPGPPGPKGNPGLPGQPGLIGPPGLKGTIGDMGFPGPQGVEGPPGPSGVPGQPGSPGLPGQKGDKGDPGISSIGLPGLPGPKGEPGLPGYPGNPGIKGSVGDPGLPGLPGTPGAKGQPGLPGFPGTPGPPGPKGISGPPGNPGLPGEPGPVGGGGHPGQPGPPGEKGKPGQDGIPGPAGQKGEPGQPGFGNPGPPGLPGLSGQKGDGGLPGIPGNPGLPGPKGEPGFHGFPGVQGPPGPPGSPGPALEGPKGNPGPQGPPGRPGLPGPEGPPGLPGNGGIKGEKGNPGQPGLPGLPGLKGDQGPPGLQGNPGRPGLNGMKGDPGLPGVPGFPGMKGPSGVPGSAGPEGEPGLIGPPGPPGLPGPSGQSIIIKGDAGPPGIPGQPGLKGLPGPQGPQGLPGPTGPPGDPGRNGLPGFDGAGGRKGDPGLPGQPGTRGLDGPPGPDGLQGPPGPPGTSSVAHGFLITRHSQTTDAPQCPQGTLQVYEGFSLLYVQGNKRAHGQDLGTAGSCLRRFSTMPFMFCNINNVCNFASRNDYSYWLSTPEPMPMSMQPLKGQSIQPFISRCAVCEAPAVVIAVHSQTIQIPHCPQGWDSLWIGYSFMMHTSAGAEGSGQALASPGSCLEEFRSAPFIECHGRGTCNYYANSYSFWLATVDVSDMFSKPQSETLKAGDLRTRISRCQVCMKRT

SEQ ID NO: 497 - protein, 1691 aa, Homo sapiens
MLINKLWLLLVTLCLTEELAAAGEKSYGKPCGGQDCSGSCQCFPEKGARGRPGPIGIQGPTGPQGFTGSTGLSGLKGERGFPGLLGPYGPKGDKGPMGVPGFLGINGIPGHPGQPGPRGPPGLDGCNGTQGAVGFPGPDGYPGLLGPPGLPGQKGSKGDPVLAPGSFKGMKGDPGLPGLDGITGPQGAPGFPGAVGPAGPPGLQGPPGPPGPLGPDGNMGLGFQGEKGVKGDVGLPGPAGPPPSTGELEFMGFPKGKKGSKGEPGPKGFPGISGPPGFPGLGTTGEKGEKGEKGIPGLPGPRGPMGSEGVQGPPGQQGKKGTLGFPGLNGFQGIEGQKGDIGLPGPDVFIDIDGAVISGNPGDPGVPGLPGLKGDEGIQGLRGPSGVPGLPALSGVPGALGPQGFPGLKGDQGNPGRTTIGAAGLPGRDGLPGPPGPPGPPSPEFETETLHNKESGFPGLRGEQGPKGNLGLKGIKGDSGFCACDGGVPNTGPPGEPGPPGPWGLIGLPGLKGARGDRGSGGAQGPAGAPGLVGPLGPSGPKGKKGEPILSTIQGMPGDRGDSGSQGFRGVIGEPGKDGVPGLPGLPGLPGDGGQGFPGEKGLPGLPGEKGHPGPPGLPGNGLPGLPGPRGLPGDKGKDGLPGQQGLPGSKGITLPCIIPGSYGPSGFPGTPGFPGPKGSRGLPGTPGQPGSSGSKGEPGSPGLVHLPELPGFPGPRGEKGLPGFPGLPGKDGLPGMIGSPGLPGSKGATGDIFGAENGAPGEQGLQGLTGHKGFLGDSGLPGLKGVHGKPGLLGPKGERGSPGTPGQVGQPGTPGSSGPYGIKGKSGLPGAPGFPGISGHPGKKGTRGKKGPPGSIVKKGLPGLKGLPGNPGLVGLKGSPGSPGVAGLPALSGPKGEKGSVGFVGFPGIPGLPGIPGTRGLKGIPGSTGKMGPSGRAGTPGEKGDRGNPGPVGIPSPRRPMSNLWLKGDKGSQGSAGSNGFPGPRGDKGEAGRPGPPGLPGAPGLPGIIKGVSGKPGPPGFMGIRGLPGLKGSSGITGFPGMPGESGSQGIRGSPGLPGASGLPGLKGDNGQTVEISGSPGPKGQPGESGFKGTKGRDGLIGNIGFPGNKGEDGKVGVSGDVGLPGAPGFPGVAGMRGEPGLPGSSGHQGAIGPLGSPGLIGPKGFPGFPGLHGLNGLPGTKGTHGTPGPSITGVPGPAGLPGPKGEKGYPGIGIGAPGKPGLRGQKGDRGFPGLQGPAGLPGAPGISLPSLIAGQPGDPGRPGLDGERGRPGPAGPPGPPGPSSNQGDTGDPGFPGIPGPKGPKGDQGIPGFSGLPGELGLKGMRGEPGFMGTPGKVGPPGDPGFPGMKGKAGPRGSSGLQGDPGQTPTAEAVQVPPGPLGLPGIDGIPGLTGDPGAQGPVGLQGSKGLPGIPGKDGPSGLPGPPGALGDPGLPGLQGPPGFEGAPGQQGPFGMPGMPGQSMRVGYTLVKHSQSEQVPPCPIGMSQLWVGYSLLFVEGQEKAHNQDLGFAGSCLPRFSTMPFIYCNINEVCHYARRNDKSYWLSTTAPIPMMPVSQTQIPQYISRCSVCEAPSQAIAVHSQDITIPQCPLGWRSLWIGYSFLMHTAAGAEGGGQSLVSPGSCLEDFRATPFIECSGARGTCHYFANKYSFWLTTVEERQQFGELPVSETLKAGQLHTRVSRCQVCMKSL

SEQ ID NO: 498 - protein, 2944 aa, Homo sapiens; identical to SEQ ID NO: 490

SEQ ID NO: 499 - protein, 1838 aa, Homo sapiens
MDVHTRWKARSALRPGAPLLPPLLLLLLWAPPPSRAAQPADLLKVLDFHNLPDGITKTTGFCATRRSSKGPDVAYRVTKDAQLSAPTKQLYPASAFPEDFSILTTVKAKKGSQAFLVSIYNEQGIQQIGLELGRSPVFLYEDHTGKPGPEDYPLFRGINLSDGKWHRIALSVHKKNVTLILDCKKKTTKFLDRSDHPMIDINGIIVFGTRILDEEVFEGDIQQLLFVSDHRAAYDYCEHYSPDCDTAVPDTPQSQDPNPDEYYTEGDGEGETYYYEYPYYEDPEDLGKEPTPSKKPVEAAKETTEVPEELTPTPTEAAPMPETSEGAGKEEDVGIGDYDYVPSEDYYTPSPYDDLTYGEGEENPDQPTDPGAGAEIPTSTADTSNSSNPAPPPGEGADDLEGEFTEETIRNLDENYYDPYYDPTSSPSEIGPGMPANQDTIYEGIGGPRGEKGQKGEPAIIEPGMLIEGPPGPEGPAGLPGPPGTMGPTGQVGDPGERGPPGRPGLPGADGLPGPPGTMLMLPFRFGGGGDAGSKGPMVSAQESQAQAILQQARLALRGPAGPMGLTGRPGPVGPPGSGGLKGEPGDVGPQGPRGVQGPPGPAGKPGRRGRAGSDGARGMPGQTGPKGDRGFDGLAGLPGEKGHRGDPGPSGPPGPPGDDGERGDDGEVGPRGLPGEPGPRGLLGPKGPPGPPGPPGVTGMDGQPGPKGNVGPQGEPGPPGQQGNPGAQGLPGPQGAIGPPGEKGPLGKPGLPGMPGADGPPGHPGKEGPPGEKGGQGPPGPQGPIGYPGPRGVKGADGIRGLKGTKGEKGEDGFPGFKGDMGIKGDRGEIGPPGPRGEDGPEGPKGRGGPNGDPGPLGPPGEKGKLGVPGLPGYPGRQGPKGSIGFPGFPGANGEKGGRGTPGKPGPRGQRGPTGPRGERGPRGITGKPGPKGNSGGDGPAGPPGERGPNGPQGPTGFPGPKGPPGPPGKDGLPGHPGQRGETGFQGKTGPPGPPGVVGPQGPTGETGPMGERGHPGPPGPPGEQGLPGLAGKEGTKGDPGPAGLPGKDGPPGLRGFPGDRGLPGPVGALGLKGNEGPPGPPGPAGSPGERGPAGAAGPIGIPGRPGPQGPPGPAGEKGAPGEKGPQGPAGRDGLQGPVGLPGPAGPVGPPGEDGDKGEIGEPGQKGSKGDKGEQGPPGPTGPQGPIGQPGPSGADGEPGPRGQQGLFGQKGDEGPRGFPGPPGPVGLQGLPGPPGEKGETGDVGQMGPPGPPGPRGPSGAPGADGPQGPPGGIGNPGAVGEKGEPGEAGEPGLPGEGGPPGPKGERGEKGESGPSGAAGPPGPKGPPGDDGPKGSPGPVGFPGDPGPPGEPGPAGQDGPPGDKGDDGEPGQTGSPGPTGEPGPSGPPGKRGPPGPAGPEGRQGEKGAKGEAGLEGPPGKTGPIGPQGAPGKPGPDGLRGIPGPVGEQGLPGSPGPDGPPGPMGPPGLPGLKGDSGPKGEKGHPGLIGLIGPPGEQGEKGDRGLPGPQGSSGPKGEQGITGPSGPIGPPGPPGLPGPPGPKGAKGSSGPTGPKGEAGHPGPPGPPGPPGEVIQPLPIQASRTRRNIDASQLLDDGNGENYVDYADGMEEIFGSLNSLKLEIEQMKRPLGTQQNPARTCKDLQLCHPDFPDGEYWVDPNQGCSRDSFKVYCNFTAGGSTCVFPDKKSEGARITSWPKENPGSWFSEFKRGKLLSYVDAEGNPVGVVQMTFLRLLSASAHQNVTYHCYQSVAWQDAATGSYDKALRFLGSNDEEMSYDNNPYIRALVDGCATKKGYQKTVLEIDTPKVEQVPIVDIMFNDFGEASQKFGFEVGPACFMG

SEQ ID NO: 500 - protein, 1499 aa, Homo sapiens
MMANWAEARPLLILIVLLGQFVSIKAQEEDEDEGYGEEIACTQNGQMYLNRDIWKPAPCQICVCDNGAILCDKIECQDVLDCADPVTPPGECCPVCSQTPGGGNTNFGRGRKGQKGEPGLVPVVTGIRGRPGPAGPPGSQGPRGERGPKGRPGPRGPQGIDGEPGVPGQPGAPGPPGHPSHPGPDGLSRPFSAQMAGLDEKSGLGSQVGLMPGSVGPVGPRGPQGLQGQQGGAGPTGPPGEPGDPGPMGPIGSRGPEGPPGKPGEDGEPGRNGNPGEVGFAGSPGARGFPGAPGLPGLKGHRGHKGLEGPKGEVGAPGSKGEAGPTGPMGAMGPLGPRGMPGERGRLGPQGAPGQRGAHGMPGKPGPMGPLGIPGSSGFPGNPGMKGEAGPTGARGPEGPQGQRGETGPPGPVGSPGLPGAIGTDGTPGAKGPTGSPGTSGPPGSAGPPGSPGPQGSTGPQGIRGQPGDPGVPGFKGEAGPKGEPGPHGIQGPIGPPGEEGKRGPRGDPGTVGPPGPVGERGAPGNRGFPGSDGLPGPKGAQGERGPVGSSGPKGSQGDPGRPGEPGLPGARGLTGNPGVQGPEGKLGPLGAPGEDGRPGPPGSIGIRGQPGSMGLPGPKGSSGDPGKPGEAGNAGVPGQRGAPGKDGEVGPSGPVGPPGLAGERGEQGPPGPTGFQGLPGPPGPPGEGGKPGDQGVPGDPGAVGPLGPRGERGNPGERGEPGITGLPGEKGMAGGHGPDGPKGSPGPSGTPGDTGPPGLQGMPGERGIAGTPGPKGDRGGIGEKGAEGTAGNDGARGLPGPLGPPGPAGPTGEKGEPGPRGLVGPPGSRGNPGSRGENGPTGAVGFAGPQGPDGQPGVKGEPGEPGQKGDAGSPGPQGLAGSPGPHGPNGVPGLKGGRGTQGPPGATGFPGSAGRVGPPGPAGAPGPAGPLGEPGKEGPPGLRGDPGSHGRVGDRGPAGPPGGPGDKGDPGEDGQPGPDGPPGPAGTTGQRGIVGMPGQRGERGMPGLPGPAGTPGKVGPTGATGDKGPPGPVGPPGSNGPVGEPGPEGPAGNDGTPGRDGAVGERGDRGDPGPAGLPGSQGAPGTPGPVGAPGDAGQRGDPGSRGPIGPPGRAGKRGLPGPQGPRGDKGDHGDRGDRGQKGHRGFTGLQGLPGPPGPNGEQGSAGIPGPFGPRGPPGPVGPSGKEGNPGPLGPIGPPGVRGSVGEAGPEGPPGEPGPPGPPGPPGHLTAALGDIMGHYDESMPDPLPEFTEDQAAPDDKNKTDPGVHATLKSLSSQIETMRSPDGSKKHPARTCDDLKLCHSAKQSGEYWIDPNQGSVEDAIKVYCNMETGETCISANPSSVPRKTWWASKSPDNKPVWYGLDMNRGSQFAYGDHQSPNTAITQMTFLRLLSKEASQNITYICKNSVGYMDDQAKNLKKAVVLKGANDLDIKAEGNIRFRYIVLQDTCSKRNGNVGKTVFEYRTQNVARLPIIDLAPVDVGGTDQEFGVEIGPVCFV

SEQ ID NO: 501 - protein, 1745 aa, Homo sapiens
MGNRRDLGQPRAGLCLLLAALQLLPGTQADPVDVLKALGVQGGQAGVPEGPGFCPQRTPEGDRAFRIGQASTLGIPTWELFPEGHFPENFSLLITLRGQPANQSVLLSIYDERGARQLGLALGPALGLLGDPFRPLPQQVNLTDGRWHRVAVSIDGEMVTLVADCEAQPPVLGHGPRFISIAGLTVLGTQDLGEKTFEGDIQELLISPDPQAAFQACERYLPDCDNLAPAATVAPQGEPETPRPRRKGKGKGRKKGRGRKGKGRKKNKEIWTSSPPPDSAENQTSTDIPKTETPAPNLPPTPTPLVVTSTVTTGLNATILERSLDPDSGTELGTLETKAAREDEEGDDSTMGPDFRAAEYPSRTQFQIFPGAGEKGAKGEPAVIEKGQQFEGPPGAPGPQGVVGPSGPPGPPGFPGDPGPPGPAGLPGIPGIDGIRGPPGTVIMMPFQFAGGSFKGPPVSFQQAQAQAVLQQTQLSMKGPPGPVGLTGRPGPVGLPGHPGLKGEEGAEGPQGPRGLQGPHGPPGRVGKMGRPGADGARGLPGDTGPKGDRGFDGLPGLPGEKGQRGDFGHVGQPGPPGEDGERGAEGPPGPTGQAGEPGPRGLLGPRGSPGPTGRPGVTGIDGAPGAKGNVGPPGEPGPPGQQGNHGSQGLPGPQGLIGTPGEKGPPGNPGIPGLPGSDGPLGHPGHEGPTGEKGAQGPPGSAGPPGYPGPRGVKGTSGNRGLQGEKGEKGEDGFPGFKGDVGLKGDQGKPGAPGPRGEDGPEGPKGQAGQAGEEGPPGSAGEKGKLGVPGLPGYPGRPGPKGSIGFPGPLGPIGEKGKSGKTGQPGLEGERGPPGSRGERGQPGATGQPGPKGDVGQDGAPGIPGEKGLPGLQGPPGFPGPKGPPGHQGKDGRPGHPGQRGELGFQGQTGPPGPAGVLGPQGKTGEVGPLGERGPPGPPGPPGEQGLPGLEGREGAKGELGPPGPLGKEGPAGLRGFPGPKGGPGDPGPTGLKGDKGPPGPVGANGSPGERGPLGPAGGIGLPGQSGSEGPVGPAGKKGSRGERGPPGPTGKDGIPGPLGPLGPPGAAGPSGEEGDKGDVGAPGHKGSKGDKGDAGPPGQPGIRGPAGHPGPPGADGAQGRRGPPGLFGQKGDDGVRGFVGVIGPPGLQGLPGPPGEKGEVGDVGSMGPHGAPGPRGPQGPTGSEGTPGLPGGVGQPGAVGEKGERGDAGDPGPPGAPGIPGPKGDIGEKGDSGPSGAAGPPGKKGPPGEDGAKGSVGPTGLPGDLGPPGDPGVSGIDGSPGEKGDPGDVGGPGPPGASGEPGAPGPPGKRGPSGHMGREGREGEKGAKGEPGPDGPPGRTGPMGARGPPGRVGPEGLRGIPGPVGEPGLLGAPGQMGPPGPLGPSGLPGLKGDTGPKGEKGHIGLIGLIGPPGEAGEKGDQGLPGVQGPPGPKGDPGPPGPIGSLGHPGPPGVAGPLGQKGSKGSPGSMGPRGDTGPAGPPGPPGAPAELHGLRRRRRFVPVPLPVVEGGLEEVLASLTSLSLELEQLRRPPGTAERPGLVCHELHRNHPHLPDGEYWIDPNQGCARDSFRVFCNFTAGGETCLYPDKKFEIVKLASWSKEKPGGWYSTFRRGKKFSYVDADGSPVNVVQLNFLKLLSATARQNFTYSCQNAAAWLDEATGDYSHSARFLGTNGEELSFNQTTAATVSVPQDGCRLRKGQTKTLFEFSSSRAGFLPLWDVAATDFGQTNQKFGFELGPVCFSS

SEQ ID NO: 502 - protein, 824 aa, Homo sapiens
MRQSLLFLTSVVPFVLAPRPPDDPGFGPHQRLEKLDSLLSDYDILSLSNIQQHSVRKRDLQTSTHVETLLTFSALKRHFKLYLTSSTERFSQNFKVVVVDGKNESEYTVKWQDFFTGHVVGEPDSRVLAHIRDDDVIIRINTDGAEYNIEPLWRFVNDTKDKRMLVYKSEDIKNVSRLQSPKVCGYLKVDNEELLPKGLVDREPPEELVHRVKRRADPDPMKNTCKLLVVADHRFYRYMGRGEESTTTNYLIELIDRVDDIYRNTSWDNAGFKGYGIQIEQIRILKSPQEVKPGEKHYNMAKSYPNEEKDAWDVKMLLEQFSFDIAEEASKVCLAHLFTYQDFDMGTLGLAYVGSPRANSHGGVCPKAYYSPVGKKNIYLNSGLTSTKNYGKTILTKEADLVTTHELGHNFGAEHDPDGLAECAPNEDQGGKYVMYPIAVSGDHENNKMFSNCSKQSIYKTIESKAQECFQERSNKVCGNSRVDEGEECDPGIMYLNNDTCCNSDCTLKEGVQCSDRNSPCCKNCQFETAQKKCQEAINATCKGVSYCTGNSSECPPPGNAEDDTVCLDLGKCKDGKCIPFCEREQQLESCACNETDNSCKVCCRDLSGRCVPYVDAEQKNLFLRKGKPCTVGFCDMNGKCEKRVQDVIERFWDFIDQLSINTFGKFLADNIVGSVLVFSLIFWIPFSILVHCVDKKLDKQYESLSLFHPSNVEMLSSMDSASVRIIKPFPAPQTPGRLQPAPVIPSAPAAPKLDHQRMDTIQEDPSTDSHMDEDGFEKDPFPNSSTAAKSFEDLTDHPVTRSEKAASFKLQRQNRVDSKETEC

SEQ ID NO: 503 - protein, 423 aa, Homo sapiens
MRSLGANMAAALRAAGVLLRDPLASSSWRVCQPWRWKSGAAAAAVTTETAQHAQGAKPQVQPQKRKPKTGILMLNMGGPETLGDVHDFLLRLFLDRDLMTLPIQNKLAPFIAKRRTPKIQEQYRRIGGGSPIKIWTSKQGEGMVKLLDELSPNTAPHKYYIGFRYVHPLTEEAIEEMERDGLERAIAFTQYPQYSCSTTGSSLNAIYRYYNQVGRKPTMKWSTIDRWPTHHLLIQCFADHILKELDHFPLEKRSEVVILFSAHSLPMSVVNRGDPYPQEVSATVQKVMERLEYCNPYRLVWQSKVGPMPWLGPQTDESIKGLCERGRKNILLVPIAFTSDHIETLYELDIEYSQVLAKECGVENIRRAESLNGNPLFSKALADLVHSHIQSNELCSKQLTLSCPLCVNPVCRETKSFFTSQQL

SEQ ID NO: 504 - protein, 307 aa, Homo sapiens
MGGLTASDVHPTLGVQLFSAGIAACLADVITFPLDTAKVRLQVQGECPTSSVIRYKGVLGTITAVVKTEGRMKLYSGLPAGLQRQISSASLRIGLYDTVQEFLTAGKETAPSLGSKILAGLTTGGVAVFIGQPTEVVKVRLQAQSHLHGIKPRYTGTYNAYRIIATTEGLTGLWKGTTPNLMRSVIINCTELVTYDLMKEAFVKNNILADDVPCHLVSALIAGFCATAMSSPVDVVKTRFINSPPGQYKSVPNCAMKVFTNEGPTAFFKGLVPSFLRLGSWNVIMFVCFEQLKRELSKSRQTMDCAT

SEQ ID NO: 505 - protein, 1118 aa, Homo sapiens
MARSPGRAYALLLLLICFNVGSGLHLQVLSTRNENKLLPKHPHLVRQKRAWITAPVALREGEDLSKKNPIAKIHSDLAEERGLKITYKYTGKGITEPPFGIFVFNKDTGELNVTSILDREETPFFLLTGYALDARGNNVEKPLELRIKVLDINDNEPVFTQDVFVGSVEELSAAHTLVMKINATDADEPNTLNSKISYRIVSLEPAYPPVFYLNKDTGEIYTTSVTLDREEHSSYTLTVEARDGNGEVTDKPVKQAQVQIRILDVNDNIPVVENKVLEGMVEENQVNVEVTRIKVFDADEIGSDNWLANFTFASGNEGGYFHIETDAQTNEGIVTLIKEVDYEEMKNLDFSVIVANKAAFHKSIRSKYKPTPIPIKVKVKNVKEGIHFKSSVISIYVSESMDRSSKGQIIGNFQAFDEDTGLPAHARYVKLEDRDNWISVDSVTSEIKLAKLPDFESRYVQNGTYTVKIVAISEDYPRKTITGTVLINVEDINDNCPTLIEPVQTICHDAEYVNVTAEDLDGHPNSGPFSFSVIDKPPGMAEKWKIARQESTSVLLQQSEKKLGRSEIQFLISDNQGFSCPEKQVLTLTVCECLHGSGCREAQHDSYVGLGPAAIALMILAFLLLLLVPLLLLMCHCGKGAKGFTPIPGTIEMLHPWNNEGAPPEDKVVPSFLPVDQGGSLVGRNGVGGMAKEATMKGSSSASIVKGQHEMSEMDGRWEEHRSLLSGRATQFTGATGAIMTTETTKTARATGASRDMAGAQAAAVALNEEFLRNYFTDKAASYTEEDENHTAKDCLLVYSQEETESLNASIGCCSFIEGELDDRFLDDLGLKFKTLAEVCLGQKIDINKEIEQRQKPATETSMNTASHSLCEQTMVNSENTYSSGSSFPVPKSLQEANAEKVTQEIVTERSVSSRQAQKVATPLPDPMASRNVIATETSYVTGSTMPPTTVILGPSQPQSLIVTERVYAPASTLVDQPYANEGTVVVTERVIQPHGGGSNPLEGTQHLQDVPYVMVRERESFLAPSSGVQPTLAMPNIAVGQNVTVTERVLAPASTLQSSYQIPTENSMTARNTTVSGAGVPGPLPDFGLEESGHSNSTITTSSTRVTKHSTVQHSYS

SEQ ID NO: 506 - protein, 747 aa, Homo sapiens
MNHSPLKTALAYECFQDQDNSTLALPSDQKMKTGTSGRQRVQEQVMMTVKRQKSKSSQSSTLSHSNRGSMYDGLADNYNYGTTSRSSYYSKFQAGNGSWGYPIYNGTLKREPDNRRFSSYSQMENWSRHYPRGSCNTTGAGSDICFMQKIKASRSEPDLYCDPRGTLRKGTLGSKGQKTTQNRYSFYSTCSGQKAIKKCPVRPPSCASKQDPVYIPPISCNKDLSFGHSRASSKICSEDIECSGLTIPKAVQYLSSQDEKYQAIGAYYIQHTCFQDESAKQQVYQLGGICKLVDLLRSPNQNVQQAAAGALRNLVFRSTTNKLETRRQNGIREAVSLLRRTGNAEIQKQLTGLLWNLSSTDELKEELIADALPVLADRVIIPFSGWCDGNSNMSREVVDPEVFFNATGCLRKRLGMRELLALVPQRATSSRVNLSSADAGRQTMRNYSGLIDSLMAYVQNCVAASRCDDKSVENCMCVLHNLSYRLDAEVPTRYRQLEYNARNAYTEKSSTGCFSNKSDKMMNNNYDCPLPEEETNPKGSGWLYHSDAIRTYLNLMGKSKKDATLEACAGALQNLTASKGLMSSGMSQLIGLKEKGLPQIARLLQSGNSDVVRSGASLLSNMSRHPLLHRVMGNQVFPEVTRLLTSHTGNTSNSEDILSSACYTVRNLMASQPQLAKQYFSSSMLNNIINLCRSSASPKAAEAARLLLSDMWSSKELQGVLRQQGFDRNMLGTLAGANSLRNFTSRF

SEQ ID NO: 507 - protein, 713 aa, Homo sapiens
MATGQDRVVALVDMDCFFVQVEQRQNPHLRNKPCAVVQYKSWKGGGIIAVSYEARAFGVTRSMWADDAKKLCPDLLLAQVRESRGKANLTKYREASVEVMEIMSRFAVIERASIDEAYVDLTSAVQERLQKLQGQPISADLLPSTYIEGLPQGPTTAEETVQKEGMRKQGLFQWLDSLQIDNLTSPDLQLTVGAVIVEEMRAAIERETGFQCSAGISHNKVLAKLACGLNKPNRQTLVSHGSVPQLFSQMPIRKIRSLGGKLGASVIEILGIEYMGELTQFTESQLQSHFGEKNGSWLYAMCRGIEHDPVKPRQLPKTIGCSKNFPGKTALATREQVQWWLLQLAQELEERLTKDRNDNDRVATQLVVSIRVQGDKRLSSLRRCCALTRYDAHKMSHDAFTVIKNCNTSGIQTEWSPPLTMLFLCATKFSASAPSSSTDITSFLSSDPSSLPKVPVTSSEAKTQGSGPAVTATKKATTSLESFFQKAAERQKVKEASLSSLTAPTQAPMSNSPSKPSLPFQTSQSTGTEPFFKQKSLLLKQKQLNNSSVSSPQQNPWSNCKALPNSLPTEYPGCVPVCEGVSKLEESSKATPAEMDLAHNSQSMHASSASKSVLEVTQKATPNPSLLAAEDQVPCEKCGSLVPVWDMPEHMDYHFALELQKSFLQPHSSNPQVVSAVSHQGKRNPKSPLACTNKRPRPEGMQTLESFFKPLTH

SEQ ID NO: 508 - protein, 115 aa, Homo sapiens
MIPAKDMAKVMIVMLAICFLTKSDGKSVKKRSVSEIQLMHNLGKHLNSMERVEWLRKKLQDVHNFVALGAPLAPRDAGSQRPRKKEDNVLVESHEKSLGEADKADVNVLTKAKSQ

SEQ ID NO: 509 - protein, 730 aa, Homo sapiens
MPGVARLPLLLGLLLLPRPGRPLDLADYTYDLAEEDDSEPLNYKDPCKAAAFLGDIALDEEDLRAFQVQQAVDLRRHTARKSSIKAAVPGNTSTPSCQSTNGQPQRGACGRWRGRSRSRRAATSRPERVWPDGVIPFVIGGNFTGSQRAVFRQAMRHWEKHTCVTFLERTDEDSYIVFTYRPCGCCSYVGRRGGGPQAISIGKNCDKFGIVVHELGHVVGFWHEHTRPDRDRHVSIVRENIQPGQEYNFLKMEPQEVESLGETYDFDSIMHYARNTFSRGIFLDTIVPKYEVNGVKPPIGQRTRLSKGDIAQARKLYKCPACGETLQDSTGNFSSPEYPNGYSAHMHCVWRISVTPGEKIILNFTSLDLYRSRLCWYDYVEVRDGFWRKAPLRGRFCGSKLPEPIVSTDSRLWVEFRSSSNWVGKGFFAVYEAICGGDVKKDYGHIQSPNYPDDYRPSKVCIWRIQVSEGFHVGLTFQSFEIERHDSCAYDYLEVRDGHSESSTLIGRYCGYEKPDDIKSTSSRLWLKFVSDGSINKAGFAVNFFKEVDECSRPNRGGCEQRCLNTLGSYKCSCDPGYELAPDKRRCEAACGGFLTKLNGSITSPGWPKEYPPNKNCIWQLVAPTQYRISLQFDFFETEGNDVCKYDFVEVRSGLTADSKLHGKFCGSEKPEVITSQYNNMRVEFKSDNTVSKKGFKAHFFSEKRPALQPPRGRPHQLKFRVQKRNRTPQ

SEQ ID NO: 510 - protein, 302 aa, Homo sapiens
MPGVARLPLLLGLLLLPRPGRPLDLADYTYDLAEEDDSEPLNYKDPCKAAAFLGDIALDEEDLRAFQVQQAVDLRRHTARKSSIKAAVPGNTSTPSCQSTNGQPQRGACGRWRGRSRSRRAATSRPERVWPDGVIPFVIGGNFTGSQRAVFRQAMRHWEKHTCVTFLERTDEDSYIVFTYRPCGCCSYVGRRGGGPQAISIGKNCDKFGIVVHELGHVVGFWHEHTRPDRDRHVSIVRENIQPGVLHSSLLLLSCGSRNGASFPCSLESSTHQALCWTGLFLRPSPFPRLPLAAPRTLRAGV

SEQ ID NO: 511 - protein, 622 aa, Homo sapiens
MPGVARLPLLLGLLLLPRPGRPLDLADYTYDLAEEDDSEPLNYKDPCKAAAFLGDIALDEEDLRAFQVQQAVDLRRHTARKSSIKAAVPGNTSTPSCQSTNGQPQRGACGRWRGRSRSRRAATSRPERVWPDGVIPFVIGGNFTGSQRAVFRQAMRHWEKHTCVTFLERTDEDSYIVFTYRPCGCCSYVGRRGGGPQAISIGKNCDKFGIVVHELGHVVGFWHEHTRPDRDRHVSIVRENIQPGQEYNFLKMEPQEVESLGETYDFDSIMHYARNTFSRGIFLDTIVPKYEVNGVKPPIGQRTRLSKGDIAQARKLYKCPACGETLQDSTGNFSSPEYPNGYSAHMHCVWRISVTPGEKIILNFTSLDLYRSRLCWYDYVEVRDGFWRKAPLRGRFCGSKLPEPIVSTDSRLWVEFRSSSNWVGKGFFAVYEAICGGDVKKDYGHIQSPNYPDDYRPSKVCIWRIQVSEGFHVGLTFQSFEIERHDSCAYDYLEVRDGHSESSTLIGRYCGYEKPDDIKSTSSRLWLKFVSDGSINKAGFAVNFFKEVDECSRPNRGGCEQRCLNTLGSYKCSCDPGYELAPDKRRCEGCYDLQVGKPLLWDRHCFRLSTHGPEMLGTALRG

SEQ ID NO: 512 - protein, 717 aa, Homo sapiens
MPGVARLPLLLGLLLLPRPGRPLDLADYTYDLAEEDDSEPLNYKDPCKAAAFLGDIALDEEDLRAFQVQQAVDLRRHTARKSSIKAAVPGNTSTPSCQSTNGQPQRGACGRWRGRSRSRRAATSRPERVWPDGVIPFVIGGNFTGSQRAVFRQAMRHWEKHTCVTFLERTDEDSYIVFTYRPCGCCSYVGRRGGGPQAISIGKNCDKFGIVVHELGHVVGFWHEHTRPDRDRHVSIVRENIQPGQEYNFLKMEPQEVESLGETYDFDSIMHYARNTFSRGIFLDTIVPKYEVNGVKPPIGQRTRLSKGDIAQARKLYKCPACGETLQDSTGNFSSPEYPNGYSAHMHCVWRISVTPGEKIILNFTSLDLYRSRLCWYDYVEVRDGFWRKAPLRGRFCGSKLPEPIVSTDSRLWVEFRSSSNWVGKGFFAVYEAICGGDVKKDYGHIQSPNYPDDYRPSKVCIWRIQVSEGFHVGLTFQSFEIERHDSCAYDYLEVRDGHSESSTLIGRYCGYEKPDDIKSTSSRLWLKFVSDGSINKAGFAVNFFKEVDECSRPNRGGCEQRCLNTLGSYKCSCDPGYELAPDKRRCEAACGGFLTKLNGSITSPGWPKEYPPNKNCIWQLVAPTQYRISLQFDFFETEGNDVCKYDFVEVRSGLTADSKLHGKFCGSEKPEVITSQYNNMRVEFKSDNTVSKKGFKAHFFSGGELFGLLGHPPRRP

SEQ ID NO: 513 - protein, 823 aa, Homo sapiens
MPGVARLPLLLGLLLLPRPGRPLDLADYTYDLAEEDDSEPLNYKDPCKAAAFLGDIALDEEDLRAFQVQQAVDLRRHTARKSSIKAAVPGNTSTPSCQSTNGQPQRGACGRWRGRSRSRRAATSRPERVWPDGVIPFVIGGNFTGSQRAVFRQAMRHWEKHTCVTFLERTDEDSYIVFTYRPCGCCSYVGRRGGGPQAISIGKNCDKFGIVVHELGHVVGFWHEHTRPDRDRHVSIVRENIQPGQEYNFLKMEPQEVESLGETYDFDSIMHYARNTFSRGIFLDTIVPKYEVNGVKPPIGQRTRLSKGDIAQARKLYKCPACGETLQDSTGNFSSPEYPNGYSAHMHCVWRISVTPGEKIILNFTSLDLYRSRLCWYDYVEVRDGFWRKAPLRGRFCGSKLPEPIVSTDSRLWVEFRSSSNWVGKGFFAVYEAICGGDVKKDYGHIQSPNYPDDYRPSKVCIWRIQVSEGFHVGLTFQSFEIERHDSCAYDYLEVRDGHSESSTLIGRYCGYEKPDDIKSTSSRLWLKFVSDGSINKAGFAVNFFKEVDECSRPNRGGCEQRCLNTLGSYKCSCDPGYELAPDKRRCEAACGGFLTKLNGSITSPGWPKEYPPNKNCIWQLVAPTQYRISLQFDFFETEGNDVCKYDFVEVRSGLTADSKLHGKFCGSEKPEVITSQYNNMRVEFKSDNTVSKKGFKAHFFSVLEGAGDRHSHLSGLELLLCPHALVDTVPAPPSALHGDTHAHTHTHVHTHCPIAQETCRGPPLGASRLSPQGPGHLTLAPQEGSYLDFWDTHRGDPKPRRRRKSLKTFSLTPATFRGIWAL

SEQ ID NO: 514 - protein, 472 aa, Homo sapiens
MAGASRLLFLWLGCFCVSLAQGERPKPPFPELRKAVPGDRTAGGGPDSELQPQDKVSEHMLRLYDRYSTVQAARTPGSLEGGSQPWRPRLLREGNTVRSFRAAAAETLERKGLYIFNLTSLTKSENILSATLYFCIGELGNISLSCPVSGGCSHHAQRKHIQIDLSAWTLKFSRNQSQLLGHLSVDMAKSHRDIMSWLSKDITQLLRKAKENEEFLIGFNITSKGRQLPKRRLPFPEPYILVYANDAAISEPESVVSSLQGHRNFPTGTVPKWDSHIRAALSIERRKKRSTGVLLPLQNNELPGAEYQYKKDEVWEERKPYKTLQAQAPEKSKNKKKQRKGPHRKSQTLQFDEQTLKKARRKQWIEPRNCARRYLKVDFADIGWSEWIISPKSFDAYYCSGACQFPMPKSLKPSNHATIQSIVRAVGVVPGIPEPCCVPEKMSSLSILFFDENKNVVLKVYPNMTVESCACR

SEQ ID NO: 515 - protein, 417 aa, Homo sapiens
MHLTVFLLKGIVGFLWSCWVLVGYAKGGLGDNHVHSSFIYRRLRNHERREIQREILSILGLPHRPRPFSPGKQASSAPLFMLDLYNAMTNEENPEESEYSVRASLAEETRGARKGYPASPNGYPRRIQLSRTTPLTTQSPPLASLHDTNFLNDADMVMSFVNLVERDKDFSHQRRHYKEFRFDLTQIPHGEAVTAAEFRIYKDRSNNRFENETIKISIYQIIKEYTNRDADLFLLDTRKAQALDVGWLVFDITVTSNHWVINPQNNLGLQLCAETGDGRSINVKSAGLVGRQGPQSKQPFMVAFFKASEVLLRSVRAANKRKNQNRNKSSSHQDSSRMSSVGDYNTSEQKQACKKHELYVSFRDLGWQVHLMFPDHVPKPCCAPTKLNAISVLYFDDSSNVILKKYRNMVVRSCGCH

SEQ ID NO: 516 - protein, 475 aa, Homo sapiens
MESKALLVLTLAVWLQSLTASRGGVAAADQRRDFIDIESKFALRTPEDTAEDTCHLIPGVAESVATCHFNHSSKTFMVIHGWTVTGMYESWVPKLVAALYKREPDSNVIVVDWLSRAQEHYPVSAGYTKLVGQDVARFINWMEEEFNYPLDNVHLLGYSLGAHAAGIAGSLTNKKVNRITGLDPAGPNFEYAEAPSRLSPDDADFVDVLHTFTRGSPGRSIGIQKPVGHVDIYPNGGTFQPGCNIGEAIRVIAERGLGDVDQLVKCSHERSIHLFIDSLLNEENPSKAYRCSSKEAFEKGLCLSCRKNRCNNLGYEINKVRAKRSSKMYLKTRSQMPYKVFHYQVKIHFSGTESETHTNQAFEISLYGTVAESENIPFTLPEVSTNKTYSFLIYTEVDIGELLMLKLKWKSDSYFSWSDWWSSPGFAIQKIRVKAGETQKKVIFCSREKVSHLQKGKAPAVFVKCHDKSLNKKSG

SEQ ID NO: 517 - protein, 499 aa, Homo sapiens
MDTSPLCFSILLVLCIFIQSSALGQSLKPEPFGRRAQAVETNKTLHEMKTRFLLFGETNQGCQIRINHPDTLQECGFNSSLPLVMIIHGWSVDGVLENWIWQMVAALKSQPAQPVNVGLVDWITLAHDHYTIAVRNTRLVGKEVAALLRWLEESVQLSRSHVHLIGYSLGAHVSGFAGSSIGGTHKIGRITGLDAAGPLFEGSAPSNRLSPDDANFVDAIHTFTREHMGLSVGIKQPIGHYDFYPNGGSFQPGCHFLELYRHIAQHGFNAITQTIKCSHERSVHLFIDSLLHAGTQSMAYPCGDMNSFSQGLCLSCKKGRCNTLGYHVRQEPRSKSKRLFLVTRAQSPFKVYHYQFKIQFINQTETPIQTTFTMSLLGTKEKMQKIPITLGKGIASNKTYSFLITLDVDIGELIMIKFKWENSAVWANVWDTVQTIIPWSTGPRHSGLVLKTIRVKAGETQQRMTFCSENTDDLLLRPTQEKIFVKCEIKSKTSKRKIR

SEQ ID NO: 518 - protein, 465 aa, Homo sapiens
MLPLWTLSLLLGAVAGKEVCYERLGCFSDDSPWSGITERPLHILPWSPKDVNTRFLLYTNENPNNFQEVAADSSSISGSNFKTNRKTRFIIHGFIDKGEENWLANVCKNLFKVESVNCICVDWKGGSRTGYTQASQNIRIVGAEVAYFVEFLQSAFGYSPSNVHVIGHSLGAHAAGEAGRRTNGTIGRITGLDPAEPCFQGTPELVRLDPSDAKFVDVIHTDGAPIVPNLGFGMSQVVGHLDFFPNGGVEMPGCKKNILSQIVDIDGIWEGTRDFAACNHLRSYKYYTDSIVNPDGFAGFPCASYNVFTANKCFPCPSGGCPQMGHYADRYPGKTNDVGQKFYLDTGDASNFARWRYKVSVTLSGKKVTGHILVSLFGNKGNSKQYEIFKGTLKPDSTHSNEFDSDVDVGDLQMVKFIWYNNVINPTLPRVGASKIIVETNVGKQFNFCSPETVREEVLLTLTPC

SEQ ID NO: 519 - protein, 500 aa, Homo sapiens
MSNSVPLLCFWSLCYCFAAGSPVPFGPEGRLEDKLHKPKATQTEVKPSVRFNLRTSKDPEHEGCYLSVGHSQPLEDCSFNMTAKTFFIIHGWTMSGIFENWLHKLVSALHTREKDANVVVVDWLPLAHQLYTDAVNNTRVVGHSIARMLDWLQEKDDFSLGNVHLIGYSLGAHVAGYAGNFVKGTVGRITGLDPAGPMFEGADIHKRLSPDDADFVDVLHTYTRSFGLSIGIQMPVGHIDIYPNGGDFQPGCGLNDVLGSIAYGTITEVVKCEHERAVHLFVDSLVNQDKPSFAFQCTDSNRFKKGICLSCRKNRCNSIGYNAKKMRNKRNSKMYLKTRAGMPFRVYHYQMKIHVFSYKNMGEIEPTFYVTLYGTNADSQTLPLEIVERIEQNATNTFLVYTEEDLGDLLKIQLTWEGASQSWYNLWKEFRSYLSQPRNPGRELNIRRIRVKSGETQRKLTFCTEDPENTSISPGRELWFRKCRDGWRMKNETSPTVELP

SEQ ID NO: 520 - protein, 399 aa, Homo sapiens
MKMRFLGLVVCLVLWTLHSEGSGGKLTAVDPETNMNVSEIISYWGFPSEEYLVETEDGYILCLNRIPHGRKNHSDKGPKPVVFLQHGLLADSSNWVTNLANSSLGFILADAGFDVWMGNSRGNTWSRKHKTLSVSQDEFWAFSYDEMAKYDLPASINFILNKTGQEQVYYVGHSQGTTIGFIAFSQIPELAKRIKMFFALGPVASVAFCTSPMAKLGRLPDHLIKDLFGDKEFLPQSAFLKWLGTHVCTHVILKELCGNLCFLLCGFNERNLNMSRVDVYTTHSPAGTSVQNMLHWSQAVKFQKFQAFDWGSSAKNYFHYNQSYPPTYNVKDMLVPTAVWSGGHDWLADVYDVNILLTQITNLVFHESIPEWEHLDFIWGLDAPWRLYNKIINLMRKYQ

SEQ ID NO: 521 - protein, 1076 aa, Homo sapiens
MEPGSKSVSRSDWQPEPHQRPITPLEPGPEKTPIAQPESKTLQGSNTQQKPASNQRPLTQQETPAQHDAESQKEPRAQQKSASQEEFLAPQKPAPQQSPYIQRVLLTQQEAASQQGPGLGKESITQQEPALRQRHVAQPGPGPGEPPPAQQEAESTPAAQAKPGAKREPSAPTESTSQETPEQSDKQTTPVQGAKSKQGSLTELGFLTKLQELSIQRSALEWKALSEWVTDSESESDVGSSSDTDSPATMGGMVAQGVKLGFKGKSGYKVMSGYSGTSPHEKTSARNHRHYQDTASRLIHNMDLRTMTQSLVTLAEDNIAFFSSQGPGETAQRLSGVFAGVREQALGLEPALGRLLGVAHLFDLDPETPANGYRSLVHTARCCLAHLLHKSRYVASNRRSIFFRTSHNLAELEAYLAALTQLRALVYYAQRLLVTNRPGVLFFEGDEGLTADFLREYVTLHKGCFYGRCLGFQFTPAIRPFLQTISIGLVSFGEHYKRNETGLSVAASSLFTSGRFAIDPELRGAEFERITQNLDVHFWKAFWNITEMEVLSSLANMASATVRVSRLLSLPPEAFEMPLTADPTLTVTISPPLAHTGPGPVLVRLISYDLREGQDSEELSSLIKSNGQRSLELWPRPQQAPRSRSLIVHFHGGGFVAQTSRSHEPYLKSWAQELGAPIISIDYSLAPEAPFPRALEECFFAYCWAIKHCALLGSTGERICLAGDSAGGNLCFTVALRAAAYGVRVPDGIMAAYPATMLQPAASPSRLLSLMDPLLPLSVLSKCVSAYAGAKTEDHSNSDQKALGMMGLVRRDTALLLRDFRLGASSWLNSFLELSGRKSQKMSEPIAEPMRRSVSEAALAQPQGPLGTDSLKNLTLRDLSLRGNSETSSDTPEMSLSAETLSPSTPSDVNFLLPPEDAGEEAEAKNELSPMDRGLGVRAAFPEGFHPRRSSQGATQMPLYSSPIVKNPFMSPLLAPDSMLKSLPPVHIVACALDPMLDDSVMLARRLRNLGQPVTLRVVEDLPHGFLTLAALCRETRQAAELCVERIRLVLTPPAGAGPSGETGAAGVDGGCGGRH

SEQ ID NO: 522 - protein, 398 aa, Homo sapiens
MWLLLTMASLISVLGTTHGLFGKLHPGSPEVTMNISQMITYWGYPNEEYEVVTEDGYILEVNRIPYGKKNSGNTGQRPVVFLQHGLLASATNWISNLPNNSLAFILADAGYDVWLGNSRGNTWARRNLYYSPDSVEFWAFSFDEMAKYDLPATIDFIVKKTGQKQLHYVGHSQGTTIGFIAFSTNPSLAKRIKTFYALAPVATVKYTKSLINKLRFVPQSLFKFIFGDKIFYPHNFFDQFLATEVCSREMLNLLCSNALFIICGFDSKNFNTSRLDVYLSHNPAGTSVQNMFHWTQAVKSGKFQAYDWGSPVQNRMHYDQSQPPYYNVTAMNVPIAVWNGGKDLLADPQDVGLLLPKLPNLIYHKEIPFYNHLDFIWAMDAPQEVYNDIVSMISEDKK

SEQ ID NO: 523 - protein, 467 aa, Homo sapiens
MLIFWTITLFLLGAAKGKEVCYEDLGCFSDTEPWGGTAIRPLKILPWSPEKIGTRFLLYTNENPNNFQILLLSDPSTIEASNFQMDRKTRFIIHGFIDKGDESWVTDMCKKLFEVEEVNCICVDWKKGSQATYTQAANNVRVVGAQVAQMLDILLTEYSYPPSKVHLIGHSLGAHVAGEAGSKTPGLSRITGLDPVEASFESTPEEVRLDPSDADFVDVIHTDAAPLIPFLGFGTNQQMGHLDFFPNGGESMPGCKKNALSQIVDLDGIWAGTRDFVACNHLRSYKYYLESILNPDGFAAYPCTSYKSFESDKCFPCPDQGCPQMGHYADKFAGRTSEEQQKFFLNTGEASNFARWRYGVSITLSGRTATGQIKVALFGNKGNTHQYSIFRGILKPGSTHSYEFDAKLDVGTIEKVKFLWNNNVINPTLPKVGATKITVQKGEEKTVYNFCSEDTVREDTLLTLTPC

SEQ ID NO: 524 - protein, 469 aa, Homo sapiens
MLPPWTLGLLLLATVRGKEVCYGQLGCFSDEKPWAGTLQRPVKLLPWSPEDIDTRFLLYTNENPNNFQLITGTEPDTIEASNFQLDRKTRFIIHGFLDKAEDSWPSDMCKKMFEVEKVNCICVDWRHGSRAMYTQAVQNIRVVGAETAFLIQALSTQLGYSLEDVHVIGHSLGAHTAAEAGRRLGGRVGRITGLDPAGPCFQDEPEEVRLDPSDAVFVDVIHTDSSPIVPSLGFGMSQKVGHLDFFPNGGKEMPGCKKNVLSTITDIDGIWEGIGGFVSCNHLRSFEYYSSSVLNPDGFLGYPCASYDEFQESKCFPCPAEGCPKMGHYADQFKGKTSAVEQTFFLNTGESGNFTSWRYKVSVTLSGKEKVNGYIRIALYGSNENSKQYEIFKGSLKPDASHTCAIDVDFNVGKIQKVKFLWNKRGINLSEPKLGASQITVQSGEDGTEYNFCSSDTVEENVLQSLYPC

SEQ ID NO: 525 - protein, 753 aa, Homo sapiens
MGRLQLVVLGLTCCWAVASAAKLGAVYTEGGFVEGVNKKLGLLGDSVDIFKGIPFAAPTKALENPQPHPGWQGTLKAKNFKKRCLQATITQDSTYGDEDCLYLNIWVPQGRKQVSRDLPVMIWIYGGAFLMGSGHGANFLNNYLYDGEEIATRGNVIVVTFNYRVGPLGFLSTGDANLPGNYGLRDQHMAIAWVKRNIAAFGGDPNNITLFGESAGGASVSLQTLSPYNKGLIRRAISQSGVALSPWVIQKNPLFWAKKVAEKVGCPVGDAARMAQCLKVTDPRALTLAYKVPLAGLEYPMLHYVGFVPVIDGDFIPADPINLYANAADIDYIAGTNNMDGHIFASIDMPAINKGNKKVTEEDFYKLVSEFTITKGLRGAKTTFDVYTESWAQDPSQENKKKTVVDFETDVLFLVPTEIALAQHRANAKSAKTYAYLFSHPSRMPVYPKWVGADHADDIQYVFGKPFATPTGYRPQDRTVSKAMIAYWTNFAKTGDPNMGDSAVPTHWEPYTTENSGYLEITKKMGSSSMKRSLRTNFLRYWTLTYLALPTVTDQEATPVPPTGDSEATPVPPTGDSETAPVPPTGDSGAPPVPPTGDSGAPPVPPTGDSGAPPVPPTGDSGAPPVPPTGDSGAPPVPPTGDSGAPPVPPTGDSGAPPVPPTGDSGAPPVPPTGDAGPPPVPPTGDSGAPPVPPTGDSGAPPVTPTGDSETAPVPPTGDSGAPPVPPTGDSEAAPVPPTDDSKEAQMPAVIRF

SEQ ID NO: 526 - protein, 13 aa, Homo sapiens
SYSMEHFRWGKPV

SEQ ID NO: 527 - protein, 18 aa, Homo sapiens
DEGPYRMEHFRWGSPPKD

SEQ ID NO: 528 - protein, 11 aa, Homo sapiens
YVMGHFRWDRF

SEQ ID NO: 529 - protein, 267 aa, Homo sapiens
MPRSCCSRSGALLLALLLQASMEVRGWCLESSQCQDLTTESNLLECIRACKPDLSAETPMFPGNGDEQPLTENPRKYVMGHFRWDRFGRRNSSSSGSSGAGQKREDVSAGEDCGPLPEGGPEPRSDGAKPGPREGKRSYSMEHFRWGKPVGKKRRPVKVYPNGAEDESAEAFPLEFKRELTGQRLREGDGPDGPADDGAGAQADLEHSLLVAAEKKDEGPYRMEHFRWGSPPKDKRYGGFMTSEKSQTPLVTLFKNAIIKNAYKKGE

SEQ ID NO: 530 - protein, 189 aa, Homo sapiens
MASPFALLMVLVVLSCKSSCSLGCDLPETHSLDNRRTLMLLAQMSRISPSSCLMDRHDFGFPQEEFDGNQFQKAPAISVLHELIQQIFNLFTTKDSSAAWDEDLLDKFCTELYQQLNDLEACVMQEERVGETPLMNADSILAVKKYFRRITLYLTEKKYSPCAWEVVRAEIMRSLSLSTNLQERLRRKE

SEQ ID NO: 531 - protein, 188 aa, Homo sapiens [sequence omitted]

SEQ ID NO: 532 - protein, 189 aa, Homo sapiens
MALSFSLLMAVLVLSYKSICSLGCDLPQTHSLGNRRALILLAQMGRISHFSCLKDRHDFGFPEEEFDGHQFQKAQAISVLHEMIQQTFNLFSTEDSSAAWEQSLLEKFSTELYQQLNDLEACVIQEVGVEETPLMNEDSILAVRKYFQRITLYLTEKKYSPCAWEVVRAEIMRSLSFSTNLQKRLRRKD

SEQ ID NO: 533 - protein, 189 aa, Homo sapiens
MALPFVLLMALVVLNCKSICSLGCDLPQTHSLSNRRTLMIMAQMGRISPFSCLKDRHDFGFPQEEFDGNQFQKAQAISVLHEMIQQTFNLFSTKDSSATWDETLLDKFYTELYQQLNDLEACMMQEVGVEDTPLMNVDSILTVRKYFQRITLYLTEKKYSPCAWEVVRAEIMRSFSLSANLQERLRRKE

SEQ ID NO: 534 - protein, 189 aa, Homo sapiens
MALPFALLMALVVLSCKSSCSLDCDLPQTHSLGHRRTMMLLAQMRRISLFSCLKDRHDFRFPQEEFDGNQFQKAEAISVLHEVIQQTFNLFSTKDSSVAWDERLLDKLYTELYQQLNDLEACVMQEVWVGGTPLMNEDSILAVRKYFQRITLYLTEKKYSPCAWEVVRAEIMRSFSSSRNLQERLRRKE

SEQ ID NO: 535 - protein, 189 aa, Homo sapiens
MARSFSLLMVVLVLSYKSICSLGCDLPQTHSLRNRRALILLAQMGRISPFSCLKDRHEFRFPEEEFDGHQFQKTQAISVLHEMIQQTFNLFSTEDSSAAWEQSLLEKFSTELYQQLNDLEACVIQEVGVEETPLMNEDFILAVRKYFQRITLYLMEKKYSPCAWEVVRAEIMRSFSFSTNLKKGLRRKD

SEQ ID NO: 536 - protein, 189 aa, Homo sapiens
MALTFYLLVALVVLSYKSFSSLGCDLPQTHSLGNRRALILLAQMRRISPFSCLKDRHDFEFPQEEFDDKQFQKAQAISVLHEMIQQTFNLFSTKDSSAALDETLLDEFYIELDQQLNDLESCVMQEVGVIESPLMYEDSILAVRKYFQRITLYLTEKKYSSCAWEVVRAEIMRSFSLSINLQKRLKSKE

SEQ ID NO: 537 - protein, 189 aa, Homo sapiens
MALSFSLLMAVLVLSYKSICSLGCDLPQTHSLGNRRALILLGQMGRISPFSCLKDRHDFRIPQEEFDGNQFQKAQAISVLHEMIQQTFNLFSTEDSSAAWEQSLLEKFSTELYQQLNDLEACVIQEVGVEETPLMNEDSILAVRKYFQRITLYLIERKYSPCAWEVVRAEIMRSLSFSTNLQKRLRRKD

SEQ ID NO: 538 - protein, 189 aa, Homo sapiens
MALPFALMMALVVLSCKSSCSLGCNLSQTHSLNNRRTLMLMAQMRRISPFSCLKDRHDFEFPQEEFDGNQFQKAQAISVLHEMMQQTFNLFSTKNSSAAWDETLLEKFYIELFQQMNDLEACVIQEVGVEETPLMNEDSILAVKKYFQRITLYLMEKKYSPCAWEVVRAEIMRSLSFSTNLQKRLRRKD

SEQ ID NO: 539 - protein, 189 aa, Homo sapiens
MALSFSLLMAVLVLSYKSICSLGCDLPQTHSLGNRRALILLAQMGRISHFSCLKDRYDFGFPQEVFDGNQFQKAQAISAFHEMIQQTFNLFSTKDSSAAWDETLLDKFYIELFQQLNDLEACVTQEVGVEEIALMNEDSILAVRKYFQRITLYLMGKKYSPCAWEVVRAEIMRSFSFSTNLQKGLRRKD

SEQ ID NO: 540 - protein, 189 aa, Homo sapiens
MALSFSLLMAVLVLSYKSICSLGCDLPQTHSLGNRRALILLAQMGRISPFSCLKDRHDFGLPQEEFDGNQFQKTQAISVLHEMIQQTFNLFSTEDSSAAWEQSLLEKFSTELYQQLNNLEACVIQEVGMEETPLMNEDSILAVRKYFQRITLYLTEKKYSPCAWEVVRAEIMRSLSFSTNLQKILRRKD

SEQ ID NO: 541 - protein, 189 aa, Homo sapiens
MALSFSLLMAVLVLSYKSICSLGCDLPQTHSLGNRRALILLAQMGRISPFSCLKDRHDFGFPQEEFDGNQFQKAQAISVLHEMIQQTFNLFSTKDSSATWEQSLLEKFSTELNQQLNDLEACVIQEVGVEETPLMNVDSILAVKKYFQRITLYLTEKKYSPCAWEVVRAEIMRSFSLSKIFQERLRRKE

SEQ ID NO: 542 - protein, 166 aa, Homo sapiens
MKYTSYILAFQLCIVLGSLGCYCQDPYVKEAENLKKYFNAGHSDVADNGTLFLGILKNWKEESDRKIMQSQIVSFYFKLFKNFKDDQSIQKSVETIKEDMNVKFFNSNKKKRDDFEKLTNYSVTDLNVQRKAIHELIQVMAELSPAAKTGKRKRSQMLFRGRRASQ

SEQ ID NO: 543 - protein, 187 aa, Homo sapiens
MTNKCLLQIALLLCFSTTALSMSYNLLGFLQRSSNFQCQKLLWQLNGRLEYCLKDRMNFDIPEEIKQLQQFQKEDAALTIYEMLQNIFAIFRQDSSSTGWNETIVENLLANVYHQINHLKTVLEEKLEKEDFTRGKLMSSLHLKRYYGRILHYLKAKEYSHCAWTIVRVEILRNFYFINRLTGYLRN

SEQ ID NO: 544 - protein, 207 aa, Homo sapiens
MSTKPDMIQKCLWLEILMGIFIAGTLSLDCNLLNVHLRRVTWQNLRHLSSMSNSFPVECLRENIAFELPQEFLQYTQPMKRDIKKAFYEMSLQAFNIFSQHTFKYWKERHLKQIQIGLDQQAEYLNQCLEEDKNENEDMKEMKENEMKPSEARVPQLSSLELRRYFHRIDNFLKEKKYSDCAWEIVRVEIRRCLYYFYKFTALFRRK

SEQ ID NO: 545 - protein, 208 aa, Homo sapiens
MIIKHFFGTVLVLLASTTIFSLDLKLIIFQQRQVNQESLKLLNKLQTLSIQQCLPHRKNFLLPQKSLSPQQYQKGHTLAILHEMLQQIFSLFRANISLDGWEENHTEKFLIQLHQQLEYLEALMGLEAEKLSGTLGSDNLRLQVKMYFRRIHDYLENQDYSTCAWAIVQVEISRCLFFVFSLTEKLSKQGRPLNDMKQELTTEFRSPR

SEQ ID NO: 546-547 - skipped (2 entries)

SEQ ID NO: 548 - protein, 153 aa, Homo sapiens
MYRMQLLSCIALSLALVTNSAPTSSSTKKTQLQLEHLLLDLQMILNGINNYKNPKLTRMLTFKFYMPKKATELKHLQCLEEELKPLEEVLNLAQSKNFHLRPRDLISNINVIVLELKGSETTFMCEYADETATIVEFLNRWITFCQSIISTLT

SEQ ID NO: 549 - protein, 136 aa, Homo sapiens [sequence omitted]

SEQ ID NO: 550 - protein, 135 aa, Homo sapiens
MYRMQLLSCIALSLALVTNSANWVNVISDLKKIEDLIQSMHIDATLYTESDVHPSCKVTAMKCFLLELQVISLESGDASIHDTVENLIILANNSLSSNGNVTESGCKECEELEEKNIKEFLQSFVHIVQMFINTS

SEQ ID NO: 551 - protein, 153 aa, Homo sapiens
MYRMQLLSCIALSLALVTNSGIHVFILGCFSAGLPKTEANWVNVISDLKKIEDLIQSMHIDATLYTESDVHPSCKVTAMKCFLLELQVISLESGDASIHDTVENLIILANNSLSSNGNVTESGCKECEELEEKNIKEFLQSFVHIVQMFINTS

SEQ ID NO: 552 - protein, 162 aa, Homo sapiens
MNSFSTSAFGPVAFSLGLLLVLPAAFPAPGIHVFILGCFSAGLPKTEANWVNVISDLKKIEDLIQSMHIDATLYTESDVHPSCKVTAMKCFLLELQVISLESGDASIHDTVENLIILANNSLSSNGNVTESGCKECEELEEKNIKEFLQSFVHIVQMFINTS

SEQ ID NO: 553 - protein, 166 aa, Homo sapiens
MAALQKSVSSFLMGTLATSCLLLLALLVQGGAAGIHVFILGCFSAGLPKTEANWVNVISDLKKIEDLIQSMHIDATLYTESDVHPSCKVTAMKCFLLELQVISLESGDASIHDTVENLIILANNSLSSNGNVTESGCKECEELEEKNIKEFLQSFVHIVQMFINTS

SEQ ID NO: 554 - protein, 179 aa, Homo sapiens
MAALQKSVSSFLMGTLATSCLLLLALLVQGGAAAPISSHCRLDKSNFQQPYITNRTFMLAKEASLADNNTDVRLIGEKLFHGVSMSERCYLMKQVLNFTLEEVLFPQSDRFQPYMQEVVPFLARLSNRLSTCHIEGDDLHIQRNVQKLKDTVKKLGESGEIKAIGELDLLFMSLRNACI

SEQ ID NO: 555 - protein, 155 aa, Homo sapiens; identical to SEQ ID NO: 209

SEQ ID NO: 556 - protein, 135 aa, Homo sapiens
MGNYKPKLLYCSNGGHFLRILPDGTVDGTRDRSDQHIQLQLSAESVGEVYIKSTETGQYLAMDTDGLLYGSQTPNEECLFLERLEENHYNTYISKKHAEKNWFVGLKKNGSCKRGPRTHYGQKAILFLPLPVSSD

SEQ ID NO: 557 - protein, 153 aa, Homo sapiens
MTNKCLLQIALLLCFSTTALSMKPKLLYCSNGGHFLRILPDGTVDGTRDRSDQHIQLQLSAESVGEVYIKSTETGQYLAMDTDGLLYGSQTPNEECLFLERLEENHYNTYISKKHAEKNWFVGLKKNGSCKRGPRTHYGQKAILFLPLPVSSD

SEQ ID NO: 558 - protein, 211 aa, Homo sapiens
MRSGCVVVHVWILAGLWLAVAGRDSSPLVHYGWGDPIRLRHLYTSGPHGLSSCFLRIRADGVVDCARGQSAHSLLEIKAVALRTVAIKGVHSVRYLCMGADGKMQGLLQYSEEDCAFEEEIRPDGYNVYRSEKHRLPVSLSSAKQRQLYKNRGFLPLSHFLPMLPMVPEEPEDLRGHLESDMFSSPLETDSMDPFGLVTGLEAVRSPSFEK

SEQ ID NO: 559 - protein, 209 aa, Homo sapiens
MDSDETGFEHSGLWVSVLAGLLLGACQAHPIPDSSPLLQFGGQVRQRYLYTDDAQQTEAHLEIREDGTVGGAADQSPESLLQLKALKPGVIQILGVKTSRFLCQRPDGALYGSLHFDPEACSFRELLLEDGYNVYQSEAHGLPLHLPGNKSPHRDPAPRGPARFLPLPGLPPALPEPPGILAPQPPDVGSSDPLSMVGPSQGRSPSYAS

SEQ ID NO: 560 - protein, 251 aa, Homo sapiens
MLGARLRLWVCALCSVCSMSVLRAYPNASPLLGSSWGGLIHLYTATARNSYHLQIHKNGHVDGAPHQTIYSALMIRSEDAGFVVITGVMSRRYLCMDFRGNIFGSHYFDPENCRFQHQTLENGYDVYHSPQYHFLVSLGRAKRAFLPGMNPPPYSQFLSRRNEIPLIHFNTPIPRRHTRSAEDDSERDPLNVLKPRARMTPAPASCSQELPSAEDNSPMASDPLGVVRGGRVNTHAGGTGPEGCRPFAKFI

SEQ ID NO: 561 - protein, 247 aa, Homo sapiens
MTILFLTMVISYFGCMKAAPMKEANIRGQGGLAYPGVRTHGTLESVNGPKAGSRGLTSLADTFEHVIEELLDEDQKVRPNEENNKDADLYTSRVMLSSQVPLEPPLLFLLEEYKNYLDAANMSMRVRRHSDPARRGELSVCDSISEWVTAADKKTAVDMSGGTVTVLEKVPVSKGQLKQYFYETKCNPMGYTKEGCRGIDKRHWNSQCRTTQSYVRALTMDSKKRIGWRFIRIDTSCVCTLTIKRGR

SEQ ID NO: 562 - protein, 379 aa, Homo sapiens
MEQLSSANTRFALDLFLALSENNPAGNIFISPFSISSAMAMVFLGTRGNTAAQLSKTFHFNTVEEVHSRFQSLNADINKRGASYILKLANRLYGEKTYNFLPEFLVSTQKTYGADLASVDFQHASEDARKTINQWVKGQTEGKIPELLASGMVDNMTKLVLVNAIYFKGNWKDKFMKEATTNAPFRLNKKDRKTVKMMYQKKKFAYGYIEDLKCRVLELPYQGEELSMVILLPDDIEDESTGLKKIEEQLTLEKLHEWTKPENLDFIEVNVSLPRFKLEESYTLNSDLARLGVQDLFNSSKADLSGMSGARDIFISKIVHKSFVEVNEEGTEAAAATAGIATFCMLMPEENFTADHPFLFFIRHNSSGSILFLGRFSSP

SEQ ID NO: 563 - protein, 404 aa, Homo sapiens
MADKVLKEKRKLFIRSMGEGTINGLLDELLQTRVLNKEEMEKVKRENATVMDKTRALIDSVIPKGAQACQICITYICEEDSYLAGTLGLSADQTSGNYLNMQDSQGVLSSFPAPQAVQDNPAMPTSSGSEGNVKLCSLEEAQRIWKQKSAEIYPIMDKSSRTRLALIICNEEFDSIPRRTGAEVDITGMTMLLQNLGYSVDVKKNLTASDMTTELEAFAHRPEHKTSDSTFLVFMSHGIREGICGKKHSEQVPDILQLNAIFNMLNTKNCPSLKDKPKVIIIQACRGDSPGVVWFKDSVGVSGNLSLPTTEEFEDDAIKKAHIEKDFIAFCSSTPDNVSWRHPTMGSVFIGRLIEHMQEYACSCDVEEIFRKVRFSFEQPDGRAQMPTTERVTLTRCFYLFPGH

SEQ ID NO: 564 - protein, 202 aa, Homo sapiens
MKVLAAGVVPLLLVLHWKHGAGSPLPITPVNATCAIRHPCHNNLMNQIRSQLAQLNGSANALFILYYTAQGEPFPNNLDKLCGPNVTDFPPFHANGTEKAKLVELYRIVVYLGTSLGNITRDQKILNPSALSLHSKLNATADILRGLLSNVLCRLCSKYHVGHVDVTYGPDTSGKDVFQKKKLGCQLLGKYKQIIAVLAQAF

SEQ ID NO: 565 - protein, 161 aa, Homo sapiens
MDSDETGFEHSGLWVSVLAGLLLGACQAGIHVFILGCFSAGLPKTEANWVNVISDLKKIEDLIQSMHIDATLYTESDVHPSCKVTAMKCFLLELQVISLESGDASIHDTVENLIILANNSLSSNGNVTESGCKECEELEEKNIKEFLQSFVHIVQMFINTS

SEQ ID NO: 566 - protein, 154 aa, Homo sapiens
MTNKCLLQIALLLCFSTTALSMKKPKLLYCSNGGHFLRILPDGTVDGTRDRSDQHIQLQLSAESVGEVYIKSTETGQYLAMDTDGLLYGSQTPNEECLFLERLEENHYNTYISKKHAEKNWFVGLKKNGSCKRGPRTHYGQKAILFLPLPVSSD

SEQ ID NO: 567 - protein, 753 aa, Homo sapiens
MERRAWSLQCTAFVLFCAWCALNSAKAKRQFVNEWAAEIPGGPEAASAIAEELGYDLLGQIGSLENHYLFKHKNHPRRSRRSAFHITKRLSDDDRVIWAEQQYEKERSKRSALRDSALNLFNDPMWNQQWYLQDTRMTAALPKLDLHVIPVWQKGITGKGVVITVLDDGLEWNHTDIYANYDPEASYDFNDNDHDPFPRYDPTNENKHGTRCAGEIAMQANNHKCGVGVAYNSKVGGIRMLDGIVTDAIEASSIGFNPGHVDIYSASWGPNDDGKTVEGPGRLAQKAFEYGVKQGRQGKGSIFVWASGNGGRQGDNCDCDGYTDSIYTISISSASQQGLSPWYAEKCSSTLATSYSSGDYTDQRITSADLHNDCTETHTGTSASAPLAAGIFALALEANPNLTWRDMQHLVVWTSEYDPLANNPGWKKNGAGLMVNSRFGFGLLNAKALVDLADPRTWRSVPEKKECVVKDNDFEPRALKANGEVIIEIPTRACEGQENAIKSLEHVQFEATIEYSRRGDLHVTLTSAAGTSTVLLAERERDTSPNGFKNWDFMSVHTWGENPIGTWTLRITDMSGRIQNEGRIVNWKLILHGTSSQPEHMKQPRVYTSYNTVQNDRRGVEKMVDPGEEQPTQENPKENTLVSKSPSSSSVGGRRDELEEGAPSQAMLRLLQSAFSKNSPPKQSPKKSPSAKLNIPYENFYEALEKLNKPSQLKDSEDSLYNDYVDVFYNTKPYKHRDDRLLQALVDILNEEN

SEQ ID NO: 568 - protein, 638 aa, Homo sapiens
MKGGCVSQWKAAAGFLFCVMVFASAERPVFTNHFLVELHKGGEDKARQVAAEHGFGVRKLPFAEGLYHFYHNGLAKAKRRRSLHHKQQLERDPRVKMALQQEGFDRKKRGYRDINEIDINMNDPLFTKQWYLINTGQADGTPGLDLNVAEAWELGYTGKGVTIGIMDDGIDYLHPDLASNYNAEASYDFSSNDPYPYPRYTDDWFNSHGTRCAGEVSAAANNNICGVGVAYNSKVAGIRMLDQPFMTDIIEASSISHMPQLIDIYSASWGPTDNGKTVDGPRELTLQAMADGVNKGRGGKGSIYVWASGDGGSYDDCNCDGYASSMWTISINSAINDGRTALYDESCSSTLASTFSNGRKRNPEAGVATTDLYGNCTLRHSGTSAAAPEAAGVFALALEANLGLTWRDMQHLTVLTSKRNQLHDEVHQWRRNGVGLEFNHLFGYGVLDAGAMVKMAKDWKTVPERFHCVGGSVQDPEKIPSTGKLVLTLTTDACEGKENFVRYLEHVQAVITVNATRRGDLNINMTSPMGTKSILLSRRPRDDDSKVGFDKWPFMTTHTWGEDARGTWTLELGFVGSAPQKGVLKEWTLMLHGTQSAPYIDQVVRDYQSKLAMSKKEELEEELDEAVERSLKSILNKN

SEQ ID NO: 569 - protein, 794 aa, Homo sapiens; identical to SEQ ID NO: 189

SEQ ID NO: 570 - protein, 715 aa, Homo sapiens
MELRPWLLWVVAATGTLVLLAADAQGQKVFTNTWAVRIPGGPAVANSVARKHGFLNLGQIFGDYYHFWHRGVTKRSLSPHRPRHSRLQREPQVQWLEQQVAKRRTKRDVYQEPTDPKFPQQWYLSGVTQRDLNVKAAWAQGYTGHGIVVSILDDGIEKNHPDLAGNYDPGASFDVNDQDPDPQPRYTQMNDNRHGTRCAGEVAAVANNGVCGVGVAYNARIGGVRMLDGEVTDAVEARSLGLNPNHIHIYSASWGPEDDGKTVDGPARLAEEAFFRGVSQGRGGLGSIFVWASGNGGREHDSCNCDGYTNSIYTLSISSATQFGNVPWYSEACSSTLATTYSSGNQNEKQIVTTDLRQKCTESHTGTSASAPLAAGIIALTLEANKNLTWRDMQHLVVQTSKPAHLNANDWATNGVGRKVSHSYGYGLLDAGAMVALAQNWTTVAPQRKCIIDILTEPKDIGKRLEVRKTVTACLGEPNHITRLEHAQARLTLSYNRRGDLAIHLVSPMGTRSTLLAARPHDYSADGFNDWAFMTTHSWDEDPSGEWVLEIENTSEANNYGTLTKFTLVLYGTAPEGLPVPPESSGCKTLTSSQACVVCEEGFSLHQKSCVQHCPPGFAPQVLDTHYSTENDVETIRASVCAPCHASCATCQGPALTDCLSCPSHASLDPVEQTCSRQSQSSRESPPQQQPPRLPPEVEAGQRLRAGLLPSHLPE

SEQ ID NO: 571 - protein, 755 aa, Homo sapiens
MRPAPIALWLRLVLALALVRPRAVGWAPVRAPIYVSSWAVQVSQGNREVERLARKFGFVNLGPIFPDGQYFHLRHRGVVQQSLTPHWGHRLHLKKNPKVQWFQQQTLQRRVKRSVVVPTDPWFSKQWYMNSEAQPDLSILQAWSQGLSGQGIVVSVLDDGIEKDHPDLWANYDPLASYDFNDYDPDPQPRYTPSKENRHGTRCAGEVAAMANNGFCGVGVAFNARIGGVRMLDGTITDVIEAQSLSLQPQHIHIYSASWGPEDDGRTVDGPGILTREAFRRGVTKGRGGLGTLFIWASGNGGLHYDNCNCDGYTNSIHTLSVGSTTQQGRVPWYSEACASTLTTTYSSGVATDPQIVTTDLHHGCTDQHTGTSASAPLAAGMIALALEANPFLTWRDMQHLVVRASKPAHLQAEDWRTNGVGRQVSHHYGYGLLDAGLLVDTARTWLPTQPQRKCAVRVQSRPTPILPLIYIRENVSACAGLHNSIRSLEHVQAQLTLSYSRRGDLEISLTSPMGTRSTLVAIRPLDVSTEGYNNWVFMSTHFWDENPQGVWTLGLENKGYYFNTGTLYRYTLLLYGTAEDMTARPTGPQVTSSACVQRDTEGLCQACDGPAYILGQLCLAYCPPRFFNHTRLVTAGPGHTAAPALRVCSSCHASCYTCRGGSPRDCTSCPPSSTLDQQQGSCMGPTTPDSRPRLRAAACPHHRCPASAMVLSLLAVTLGGPVLCGMSMDLPLYAWLSRARATPTKPQVWLPAGT

SEQ ID NO: 572 - protein, 1860 aa, Homo sapiens
MGWGSRCCCPGRLDLLCVLALLGGCLLPVCRTRVYTNHWAVKIAGGFPEANRIASKYGFINIGQIGALKDYYHFYHSRTIKRSVISSRGTHSFISMEPKVEWIQQQVVKKRTKRDYDFSRAQSTYFNDPKWPSMWYMHCSDNTHPCQSDMNIEGAWKRGYTGKNIVVTILDDGIERTHPDLMQNYDALASCDVNGNDLDPMPRYDASNENKHGTRCAGEVAAAANNSHCTVGIAFNAKIGGVRMLDGDVTDMVEAKSVSFNPQHVHIYSASWGPDDDGKTVDGPAPLTRQAFENGVRMGRRGLGSVFVWASGNGGRSKDHCSCDGYTNSIYTISISSTAESGKKPWYLEECSSTLATTYSSGESYDKKIITTDLRQRCTDNHTGTSASAPMAAGIIALALEANPFLTWRDVQHVIVRTSRAGHLNANDWKTNAAGFKVSHLYGFGLMDAEAMVMEAEKWTTVPRQHVCVESTDRQIKTIRPNSAVRSIYKASGCSDNPNRHVNYLEHVVVRITITHPRRGDLAIYLTSPSGTRSQLLANRLFDHSMEGFKNWEFMTIHCWGERAAGDWVLEVYDTPSQLRNFKTPGKLKEWSLVLYGTSVQPYSPTNEFPKVERFRYSRVEDPTDDYGTEDYAGPCDPECSEVGCDGPGPDHCNDCLHYYYKLKNNTRICVSSCPPGHYHADKKRCRKCAPNCESCFGSHGDQCMSCKYGYFLNEETNSCVTHCPDGSYQDTKKNLCRKCSENCKTCTEFHNCTECRDGLSLQGSRCSVSCEDGRYFNGQDCQPCHRFCATCAGAGADGCINCTEGYFMEDGRCVQSCSISYYFDHSSENGYKSCKKCDISCLTCNGPGFKNCTSCPSGYLLDLGMCQMGAICKDGEYVDEHGHCQTCEASCAKCQGPTQEDCTTCPMTRIFDDGRCVSNCPSWKFEFENQCHPCHHTCQRCQGSGPTHCTSCGADNYGREHFLYQGECGDSCPEGHYATEGNTCLPCPDNCELCHSVHVCTRCMKGYFIAPTNHTCQKLECGQGEVQDPDYEECVPCEEGCLGCSLDDPGTCTSCAMGYYRFDHHCYKTCPEKTYSEEVECKACDSNCGSCDQNGCYWCEEGFFLLGGSCVRKCGPGFYGDQEMGECESCHRACETCTGPGHDECSSCQEGLQLLRGMCVHATKTQEEGKFWNDILRKLQPCHSSCKTCNGSATLCTSCPKGAYLLAQACVSSCPQGTWPSVRSGSCENCTEACAICSGADLCKKCQMQPGHPLFLHEGRCYSKCPEGSYAEDGICERCSSPCRTCEGNATNCHSCEGGHVLHHGVCQENCPERHVAVKGVCKHCPEMCQDCIHEKTCKECTPEFFLHDDMCHQSCPRGFYADSRHCVPCHKDCLECSGPKADDCELCLESSWVLYDGLCLEECPAGTYYEKETKECRDCHKSCLTCSSSGTCTTCQKGLIMNPRGSCMANEKCSPSEYWDEDAPGCKPCHVKCFHCMGPAEDQCQTCPMNSLLLNTTCVKDCPEGYYADEDSNRCAHCHSSCRTCEGRHSRQCHSCRPGWFQLGKECLLQCREGYYADNSTGRCERCNRSCKGCQGPRPTDCLSCDRFFFLLRSKGECHRSCPDHYYVEQSTQTCERCHPTCDQCKGKGALNCLSCVWSYHLMGGICTSDCLVGEYRVGEGEKFNCEKCHESCMECKGPGAKNCTLCPANLVLHMDDSHCLHCCNTSDPPSAQECCDCQDTTDECILRTSKVRPATEHFKTALFITSSMMLVLLLGAAVVVWKKSRGRVQPAAKAGYEKLADPNKSYSSYKSSYRESTSFEEDQVIEYRDRDYDEDDDDDIVYMGQDGTVYRKFKYGLLDDDDIDELEYDDESYSYYQ

SEQ ID NO: 573 - protein, 969 aa, Homo sapiens
MPPRAPPAPGPRPPPRAAAATDTAAGAGGAGGAGGAGGPGFRPLAPRPWRWLLLLALPAACSAPPPRPVYTNHWAVQVLGGPAEADRVAAAHGYLNLGQIGNLEDYYHFYHSKTFKRSTLSSRGPHTFLRMDPQVKWLQQQEVKRRVKRQVRSDPQALYFNDPIWSNMWYLHCGDKNSRCRSEMNVQAAWKRGYTGKNVVVTILDDGIERNHPDLAPNYDSYASYDVNGNDYDPSPRYDASNENKHGTRCAGEVAASANNSYCIVGIAYNAKIGGIRMLDGDVTDVVEAKSLGIRPNYIDIYSASWGPDDDGKTVDGPGRLAKQAFEYGIKKGRQGLGSIFVWASGNGGREGDYCSCDGYTNSIYTISVSSATENGYKPWYLEECASTLATTYSSGAFYERKIVTTDLRQRCTDGHTGTSVSAPMVAGIIALALEANSQLTWRDVQHLLVKTSRPAHLKASDWKVNGAGHKVSHFYGFGLVDAEALVVEAKKWTAVPSQHMCVAASDKRPRSIPLVQVLRTTALTSACAEHSDQRVVYLEHVVVRTSISHPRRGDLQIYLVSPSGTKSQLLAKRLLDLSNEGFTNWEFMTVHCWGEKAEGQWTLEIQDLPSQVRNPEKQGKLKEWSLILYGTAEHPYHTFSAHQSRSRMLELSAPELEPPKAALSPSQVEVPEDEEDYTAQSTPGSANILQTSVCHPECGDKGCDGPNADQCLNCVHFSLGSVKTSRKCVSVCPLGYFGDTAARRCRRCHKGCETCSSRAATQCLSCRRGFYHHQEMNTCVTLCPAGFYADESQKNCLKCHPSCKKCVDEPEKCTVCKEGFSLARGSCIPDCEPGTYFDSELIRCGECHHTCGTCVGPGREECIHCAKNFHFHDWKCVPACGEGFYPEEMPGLPHKVCRRCDENCLSCAGSSRNCSRCKTGFTQLGTSCITNHTCSNADETFCEMVKSNRLCERKLFIQFCCRTCLLAG

SEQ ID NO: 574 - protein, 785 aa, Homo sapiens
MPKGRQKVPHLDAPLGLPTCLWLELAGLFLLVPWVMGLAGTGGPDGQGTGGPSWAVHLESLEGDGEEETLEQQADALAQAAGLVNAGRIGELQGHYLFVQPAGHRPALEVEAIRQQVEAVLAGHEAVRWHSEQRLLRRAKRSVHFNDPKYPQQWHLNNRRSPGRDINVTGVWERNVTGRGVTVVVVDDGVEHTIQDIAPNYSPEGSYDLNSNDPDPMPHPDVENGNHHGTRCAGEIAAVPNNSFCAVGVAYGSRIAGIRVLDGPLTDSMEAVAFNKHYQINDIYSCSWGPDDDGKTVDGPHQLGKAALQHGVIAGRQGFGSIFVVASGNGGQHNDNCNYDGYANSIYTVTIGAVDEEGRMPFYAEECASMLAVTFSGGDKMLRSIVTTDWDLQKGTGCTEGHTGTSAAAPLAAGMIALMLQVRPCLTWRDVQHIIVFTATRYEDRRAEWVTNEAGFSHSHQHGFGLLNAWRLVNAAKIWTSVPYLASYVSPVLKENKAIPQSPRSLEVLWNVSRMDLEMSGLKTLEHVAVTVSITHPRRGSLELKLFCPSGMMSLIGAPRSMDSDPNGFNDWTFSTVRCWGERARGTYRLVIRDVGDESFQVGILRQWQLTLYGSVWSAVDIRDRQRLLESAMSGKYLHDDFALPCPPGLKIPEEDGYTITPNTLKTLVLVGCFTVFWTVYYMLEVYLSQRNVASNQVCRSGPCHWPHRSRKAKEEGTELESVPLCSSKDPDEVETESRGPPTTSDLLAPDLLEQGDWSLSQNKSALDCPHQHLDVPHGKEEQIC

SEQ ID NO: 575 - protein, 1052 aa, Homo sapiens
MKLVNIWLLLLVVLLCGKKHLGDRLEKKSFEKAPCPGCSHLTLKVEFSSTVVEYEYIVAFNGYFTAKARNSFISSALKSSEVDNWRIIPRNNPSSDYPSDFEVIQIKEKQKAGLLTLEDHPNIKRVTPQRKVFRSLKYAESDPTVPCNETRWSQKWQSSRPLRRASLSLGSGFWHATGRHSSRRLLRAIPRQVAQTLQADVLWQMGYTGANVRVAVFDTGLSEKHPHFKNVKERTNWTNERTLDDGLGHGTFVAGVIASMRECQGFAPDAELHIFRVFTNNQVSYTSWFLDAFNYAILKKIDVLNLSIGGPDFMDHPFVDKVWELTANNVIMVSAIGNDGPLYGTLNNPADQMDVIGVGGIDFEDNIARFSSRGMTTWELPGGYGRMKPDIVTYGAGVRGSGVKGGCRALSGTSVASPVVAGAVTLLVSTVQKRELVNPASMKQALIASARRLPGVNMFEQGHGKLDLLRAYQILNSYKPQASLSPSYIDLTECPYMWPYCSQPIYYGGMPTVVNVTILNGMGVTGRIVDKPDWQPYLPQNGDNIEVAFSYSSVLWPWSGYLAISISVTKKAASWEGIAQGHVMITVASPAETESKNGAEQTSTVKLPIKVKIIPTPPRSKRVLWDQYHNLRYPPGYFPRDNLRMKNDPLDWNGDHIHTNFRDMYQHLRSMGYFVEVLGAPFTCFDASQYGTLLMVDSEEEYFPEEIAKLRRDVDNGLSLVIFSDWYNTSVMRKVKFYDENTRQWWMPDTGGANIPALNELLSVWNMGFSDGLYEGEFTLANHDMYYASGCSIAKFPEDGVVITQTFKDQGLEVLKQETAVVENVPILGLYQIPAEGGGRIVLYGDSNCLDDSHRQKDCFWLLDALLQYTSYGVTPPSLSHSGNRQRPPSGAGSVTPERMEGNHLHRYSKVLEAHLGDPKPRPLPACPRLSWAKPQPLNETAPSNLWKHQKLLSIDLDKVVLPNFRSNRPQVRPLSPGESGAWDIPGGIMPGRYNQEVGQTIPVFAFLGAMVVLAFFVVQINKAKSRPKRRKPRVKRPQLMQQVHPPKTPSV

SEQ ID NO: 576 - protein, 692 aa, Homo sapiens
MGTVSSRRSWWPLPLLLLLLLLLGPAGARAQEDEDGDYEELVLALRSEEDGLAEAPEHGTTATFHRCAKDPWRLPGTYVVVLKEETHLSQSERTARRLQAQAARRGYLTKILHVFHGLLPGFLVKMSGDLLELALKLPHVDYIEEDSSVFAQSIPWNLERITPPRYRADEYQPPDGGSLVEVYLLDTSIQSDHREIEGRVMVTDFENVPEEDGTRFHRQASKCDSHGTHLAGVVSGRDAGVAKGASMRSLRVLNCQGKGTVSGTLIGLEFIRKSQLVQPVGPLVVLLPLAGGYSRVLNAACQRLARAGVVLVTAAGNFRDDACLYSPASAPEVITVGATNAQDQPVTLGTLGTNFGRCVDLFAPGEDIIGASSDCSTCFVSQSGTSQAAAHVAGIAAMMLSAEPELTLAELRQRLIHFSAKDVINEAWFPEDQRVLTPNLVAALPPSTHGAGWQLFCRTVWSAHSGPTRMATAVARCAPDEELLSCSSFSRSGKRRGERMEAQGGKLVCRAHNAFGGEGVYAIARCCLLPQANCSVHTAPPAEASMGTRVHCHQQGHVLTGCSSHWEVEDLGTHKPPVLRPRGQPNQCVGHREASIHASCCHAPGLECKVKEHGIPAPQEQVTVACEEGWTLTGCSALPGTSHVLGAYAVDNTCVVRSRDVSTTGSTSEGAVTAVAICCRSRHLAQASQELQ

SEQ ID NO: 577 - protein, 519 aa, Homo sapiens
MIPVSLVVVVVGGWTVVYLTDLVLKSSVYFKHSYEDWLENNGLSISPFHIRWQTAVFNRAFYSWGRRKARMLYQWFNFGMVFGVIAMFSSFFLLGKTLMQTLAQMMADSPSSYSSSSSSSSSSSSSSSSSSSSSSSLHNEQVLQVVVPGINLPVNQLTYFFTAVLISGVVHEIGHGIAAIREQVRFNGFGIFLFIIYPGAFVDLFTTHLQLISPVQQLRIFCAGIWHNFVLALLGILALVLLPVILLPFYYTGVGVLITEVAEDSPAIGPRGLFVGDLVTHLQDCPVTNVQDWNECLDTIAYEPQIGYCISASTLQQLSFPVRAYKRLDGSTECCNNHSLTDVCFSYRNNFNKRLHTCLPARKAVEATQVCRTNKDCKKSSSSSFCIIPSLETHTRLIKVKHPPQIDMLYVGHPLHLHYTVSITSFIPRFNFLSIDLPVVVETFVKYLISLSGALAIVNAVPCFALDGQWILNSFLDATLTSVIGDNDVKDLIGFFILLGGSVLLAANVTLGLWMVTAR

SEQ ID NO: 578 - protein, 476 aa, Homo sapiens
MAGRGGSALLALCGALAACGWLLGAEAQEPGAPAAGMRRRRRLQQEDGISFEYHRYPELREALVSVWLQCTAISRIYTVGRSFEGRELLVIELSDNPGVHEPGEPEFKYIGNMHGNEAVGRELLIFLAQYLCNEYQKGNETIVNLIHSTRIHIMPSLNPDGFEKAASQPGELKDWFVGRSNAQGIDLNRNFPDLDRIVYVNEKEGGPNNHLLKNMKKIVDQNTKLAPETKAVIHWIMDIPFVLSANLHGGDLVANYPYDETRSGSAHEYSSSPDDAIFQSLARAYSSFNPAMSDPNRPPCRKNDDDSSFVDGTTNGGAWYSVPGGMQDFNYLSSNCFEITVELSCEKFPPEETLKTYWEDNKNSLISYLEQIHRGVKGFVRDLQGNPIANATISVEGIDHDVTSAKDGDYWRLLIPGNYKLTASAPGYLAITKKVAVPYSPAAGVDFELESFSERKEEEKEELMEWWKMMSETLNF

SEQ ID NO: 579 - protein, 431 aa, Homo sapiens
MHVRSLRAAAPHSFVALWAPLFLLRSALADFSLDNEVHSSFIHRRLRSQERREMQREILSILGLPHRPRPHLQGKHNSAPMFMLDLYNAMAVEEGGGPGGQGFSYPYKAVFSTQGPPLASLQDSHFLTDADMVMSFVNLVEHDKEFFHPRYHHREFRFDLSKIPEGEAVTAAEFRIYKDYIRERFDNETFRISVYQVLQEHLGRESDLFLLDSRTLWASEEGWLVFDITATSNHWVVNPRHNLGLQLSVETLDGQSINPKLAGLIGRHGPQNKQPFMVAFFKATEVHFRSIRSTGSKQRSQNRSKTPKNQEALRMANVAENSSSDQRQACKKHELYVSFRDLGWQDWIIAPEGYAANYCEGECAFPLNSHMNATNHAIVQTLVHFINPETVPKPCCAPTQLNAISVLYFDDSSNVILKKYRNMVVEACGCH

SEQ ID NO: 580 - protein, 431 aa, Homo sapiens
MHVRSLRAAAPHSFVALWAPLFLLRSALADFSLDNEVHSSFIHRRLRSQERREMQREILSILGLPHRPRPHLQGKHNSAPMFMLDLYNAMAVEEGGGPGGQGFSYPYKAVFSTQGPPLASLQDSHFLTDADMVMSFVNLVEHDKEFFHPRYHHREFRFDLSKIPEGEAVTAAEFRIYKDYIRERFDNETFRISVYQVLQEHLGRESDLFLLDSRTLWASEEGWLVFDITATSNHWVVNPRHNLGLQLSVETLDGQSINPKLAGLIGRHGPQNKQPFMVAFFKATEVHFRSIRSTGSKQRSQNRSKTPKNQEALRMANVAENSSSDQRQACSKHELYVSFRDLGWQDWIIAPEGYAAYYCEGECAFPLNSYMNATNHAIVQTLVHFINPETVPKPCCAPTQLNAISVLYFDDDSNVILKKYRNMVVEACGCH

SEQ ID NO: 581 - protein, 431 aa, Homo sapiens
MHVRSLRAAAPHSFVALWAPLFLLRSALADFSLDNEVHSSFIHRRLRSQERREMQREILSILGLPHRPRPHLQGKHNSAPMFMLDLYNAMAVEEGGGPGGQGFSYPYKAVFSTQGPPLASLQDSHFLTDADMVMSFVNLVEHDKEFFHPRYHHREFRFDLSKIPEGEAVTAAEFRIYKDYIRERFDNETFRISVYQVLQEHLGRESDLFLLDSRTLWASEEGWLVFDITATSNHWVVNPRHNLGLQLSVETLDGQSINPKLAGLIGRHGPQNKQPFMVAFFKATEVHFRSIRSTGSKQRSQNRSKTPKNQEALRMANVAENSSSDQRQACSKHELYVSFRDLGWQDWIIAPEGYAAYYCEGECAFPLNSYMNATNHAIVQTLVHSINPETVPKPCCAPTQLNAISVLYFDDDSNVILKKYRNMVVRACGCH

SEQ ID NO: 582-583 - skipped (2 entries)

SEQ ID NO: 584 - DNA, 646 bp, Artificial sequence
  Synthetic sequence
atgccgtcttctgtctcgtggggcatcctcctgctggcaggcctgtgctgcctggtccctgtctccctggctgaggatccccagggagatgctgcccagaagacagatacatcccaccatgatcaggatcacccaaccttcaacaagatcacccccaacctggctgagttcgccttcagcctataccgccagctggcacaccagtccaacagcaccaatatcttcttctccccagtgagcatcgctacagcctttgcaatgctctccctggggaccaaggctgacactcacgatgaaatcctggagggcctgaatttcaacctcacggagattccggaggctcagatccatgaaggcttccaggaactcctccgtaccctcaaccagccagacagccagctccagctgaccaccggcaatggcctgttcctcagcgagggcctgaagctagtggataagtttttggaggatgttaaaaagttgtaccactcagaagccttcactgtcaacttcggggacaccgaagaggccaagaaacagatcaacgattacgtggagaagggtactcaagggaaaattgtggatttggtcaaggagcttgacagagacacagtttttgctctggtgaattacatcttctttaaag

SEQ ID NO: 585 - DNA, 815 bp, Artificial sequence
  Synthetic sequence
gagagagccctggaggcagacgtggagtgacgatgctcttccctgttctgagttgtgggtgcacctgagcagggggagaggcgcttgtcaggaagatggacagaggggagccagccccatcagccaaagccttgaggaggagcaaggcctatgtgacagggagggagaggatgtgcagggccagggccgtccagggggagtgagcgcttcctgggaggtgtccacgtgagccttgctcgaggcctgggatcagccttacaacgtgtctctgcttctctcccctccaggccgtgcataaggctgtgctgaccatcgacgagaaagggactgaagctgctggggccatgtttttagaggccatacccatgtctatcccccccgaggtcaagttcaacaaaccctttgtcttcttaatgattgaacaaaataccaagtctcccctcttcatgggaaaagtggtgaatcccacccaaaaataactgcctctcgctcctcaacccctcccctccatccctggccccctccctggatgacattaaagaagggttgagctggtccctgcctgcatgtgactgtaaatccctcccatgttttctctgagtctccctttgcctgctgaggctgtatgtgggctccaggtaacagtgctgtcttcgggccccctgaactgtgttcatggagcatctggctgggtaggcacatgctgggcttgaatccaggggggactgaatcctcagcttacggacctgggcccatctgtttctggagggctccagtcttccttgtcctgtcttggagtccccaagaaggaatca

SEQ ID NO: 586-628 - skipped (43 entries)

SEQ ID NO: 629 - protein, 18 aa, Artificial Sequence
  Synthetic sequence
  misc_feature (4)..(4): X at this position appears as "v" for SEQ ID NO: 629 in the Specification filed herewith.  This position is selected from Q, D or E.
  MISC_FEATURE (11)..(11): X at this position appears as "w" for SEQ ID NO: 629 in the Specification filed herewith.  This position is selected from S or N.
  MISC_FEATURE (12)..(12): X at this position appears as "x" for SEQ ID NO: 629 in the Specification filed herewith.  This position is selected from H, N, or I.
  MISC_FEATURE (13)..(13): X at this position appears as "y" for SEQ ID NO: 629 in the Specification filed herewith.  This position is selected from D, A, I, N, G, H, K, S, or null.
  MISC_FEATURE (14)..(14): X at this position appears as "z" for SEQ ID NO: 629 in the Specification filed herewith.  This position is selected from GGKQALETVQRLLPVLCQD (SEQ ID NO: 630) or GGKQALETVQRLLPVLCQA (SEQ ID NO: 631).
LTPXQVVAIAXXXXGHGG

SEQ ID NO: 630 - protein, 19 aa, Artificial Sequence
  Synthetic sequence
GGKQALETVQRLLPVLCQD

SEQ ID NO: 631 - protein, 19 aa, Artificial Sequence
  Synthetic sequence
GGKQALETVQRLLPVLCQA

SEQ ID NO: 632 - protein, 196 aa, Homo sapiens; identical to SEQ ID NO: 53

SEQ ID NO: 633-636 - skipped (4 entries)

SEQ ID NO: 637 - DNA, 444 bp, Homo sapiens
atggcttctcatcgtctgctcctcctctgccttgctggactggtatttgtgtctgaggctggccctacgggcaccggtgaatccaagtgtcctctgatggtcaaagttctagatgctgtccgaggcagtcctgccatcaatgtggccgtgcatgtgttcagaaaggctgctgatgacacctgggagccatttgcctctgggaaaaccagtgagtctggagagctgcatgggctcacaactgaggaggaatttgtagaagggatatacaaagtggaaatagacaccaaatcttactggaaggcacttggcatctccccattccatgagcatgcagaggtggtattcacagccaacgactccggcccccgccgctacaccattgccgccctgctgagcccctactcctattccaccacggctgtcgtcaccaatcccaaggaatga

SEQ ID NO: 638 - protein, 147 aa, Homo sapiens
MASHRLLLLCLAGLVFVSEAGPTGTGESKCPLMVKVLDAVRGSPAINVAVHVFRKAADDTWEPFASGKTSESGELHGLTTEEEFVEGIYKVEIDTKSYWKALGISPFHEHAEVVFTANDSGPRRYTIAALLSPYSYSTTAVVTNPKE

SEQ ID NO: 639-783 - skipped (145 entries)

SEQ ID NO: 784 - protein, 134 aa, Homo sapiens
MKSVLLLTTLLVPAHLVAAWSNNYAVDCPQHCDSSECKSSPRCKRTVLDDCGCCRVCAAGRGETCYRTVSGMDGMKCGPGLRCQPSNGEDPFGEEFGICKEHDMASGDGNIVREEVVKENAAGSPVMRKWLNPR

SEQ ID NO: 785 - protein, 184 aa, Homo sapiens
MKSVLLLTTLLVPAHLVAAWSNNYAVDCPQHCDSSECKSSPRCKRTVLDDCGCCRVCAAGRGETCYRTVSGMDGMKCGPGLRCQPSNGEDPFGEEFGICKDCPYGTFGMDCRETCNCQSGICDRGTGKCLKFPFFQYSVTKSSNRFVSLTEHDMASGDGNIVREEVVKENAAGSPVMRKWLNPR

SEQ ID NO: 786-809 - skipped (24 entries)

SEQ ID NO: 810 - DNA, 87 bp, Homo sapiens
gacagtgcagtcacccataaagtagaaagcactactaacagcactggagggtgtagtgtttcctactttatggatgagtgtactgtg

SEQ ID NO: 811 - DNA, 23 bp, Homo sapiens
tccataaagtaggaaacactaca

SEQ ID NO: 812 - DNA, 106 bp, Homo sapiens
tccataaagtaggaaacactacacgattccataaagtaggaaacactacaacgcgttccataaagtaggaaacactacatcactccataaagtaggaaacactaca

SEQ ID NO: 813 - DNA, 591 bp, Homo sapiens
atcaacctctggattacaaaatttgtgaaagattgactggtattcttaactatgttgctccttttacgctatgtggatacgctgctttaatgcctttgtatcatgctattgcttcccgtatggctttcattttctcctccttgtataaatcctggttgctgtctctttatgaggagttgtggcccgttgtcaggcaacgtggcgtggtgtgcactgtgtttgctgacgcaacccccactggttggggcattgccaccacctgtcagctcctttccgggactttcgctttccccctccctattgccacggcggaactcatcgccgcctgccttgcccgctgctggacaggggctcggctgttgggcactgacaattccgtggtgttgtcggggaagctgacgtcctttccatggctgctcgcctgtgttgccacctggattctgcgcgggacgtccttctgctacgtcccttcggccctcaatccagcggaccttccttcccgcggcctgctgccggctctgcggcctcttccgcgtcttcgccttcgccctcagacgagtcggatctccctttgggccgcctccccgcctg

SEQ ID NO: 814 - DNA, 591 bp, Homo sapiens
atcaacctctggattacaaaatttgtgaaagattgactgatattcttaactatgttgctccttttacgctgtgtggatatgctgctttaatgcctctgtatcatgctattgcttcccgtacggctttcgttttctcctccttgtataaatcctggttgctgtctctttatgaggagttgtggcccgttgtccgtcaacgtggcgtggtgtgctctgtgtttgctgacgcaacccccactggctggggcattgccaccacctgtcaactcctttctgggactttcgctttccccctcccgatcgccacggcagaactcatcgccgcctgccttgcccgctgctggacaggggctaggttgctgggcactgataattccgtggtgttgtcggggaagctgacgtcctttccatggctgctcgcctgtgttgccaactggatcctgcgcgggacgtccttctgctacgtcccttcggctctcaatccagcggacctcccttcccgaggccttctgccggttctgcggcctctcccgcgtcttcgctttcggcctccgacgagtcggatctccctttgggccgcctccccgcctg

SEQ ID NO: 815 - DNA, 591 bp, Homo sapiens
atcaacctctggattacaaaatttgtgaaagattgactgatattcttaactatgttgctccttttacgctgtgtggatatgctgctttaatgcctctgtatcatgctattgcttcccgtacggctttcgttttctcctccttgtataaatcctggttgctgtctctttatgaggagttgtggcccgttgtccgtcaacgtggcgtggtgtgctctgtgtttgctgacgcaacccccactggctggggcattgccaccacctgtcaactcctttctgggactttcgctttccccctcccgatcgccacggcagaactcatcgccgcctgccttgcccgctgctggacaggggctaggttgctgggcactgataattccgtggtgttgtcggggaagctgacgtcctttccttggctgctcgcctgtgttgccaactggatcctgcgcgggacgtccttctgctacgtcccttcggctctcaatccagcggacctcccttcccgaggccttctgccggttctgcggcctctcccgcgtcttcgctttcggcctccgacgagtcggatctccctttgggccgcctccccgcctg

SEQ ID NO: 816 - DNA, 591 bp, Homo sapiens
atcaacctctggattacaaaatttgtgaaagattgactgatattcttaactatgttgctccttttacgctgtgtggatatgctgctttaatgcctctgtatcatgctattgcttcccgtacggctttcgttttctcctccttgtataaatcctggttgctgtctctttatgaggagttgtggcccgttgtccgtcaacgtggcgtggtgtgctctgtgtttgctgacgcaacccccactggctggggcattgccaccacctgtcaactcctttctgggactttcgctttccccctcccgatcgccacggcagaactcatcgccgcctgccttgcccgctgctggacaggggctaggttgctgggcactgataattccgtggtgttgtcggggaagctgacgtcctttccttggctgctcgcctgtgttgccaactggatcctgcgcgggacgtccttctgctacgtcccttcggctctcaatccagcggacctcccttcccgaggccttctgccggttctgcggcctctcccgcctcttcgctttcggcctccgacgagtcggatctccctttgggccgcctccccgcctg

SEQ ID NO: 817 - DNA, 591 bp, Homo sapiens
atcaacctctggattacaaaatttgtgaaagattgactgatattcttaactatgttgctccttttacgctgtgtggatatgctgctttaatgcctctgtatcatgctattgcttcccgtacggctttcgttttctcctccttgtataaatcctggttgctgtctctttatgaggagttgtggcccgttgtccgtcaacgtggcgtggtgtgctctgtgtttgctgacgcaacccccactggctggggcattgccaccacctgtcaactcctttctgggactttcgctttccccctcccgatcgccacggcagaactcatcgccgcctgccttgcccgctgctggacaggggctaggttgctgggcactgataattccgtggtgttgtcggggaagctgacgtcctttccttggctgctcgcctgtgttgccaactggatcctgcgcgggacgtccttctgctacgtcccttcggctctcaatccagcggacctcccttcccgaggccttctgccggttctgcggcctctcccgcgtgttcgctttcggcctccgacgagtcggatctccctttgggccgcctccccgcctg

SEQ ID NO: 818 - DNA, 591 bp, Homo sapiens
atcaacctctggattacaaaatttgtgaaagattgactgatattcttaactatgttgctccttttacgctgtgtggatatgctgctttaatgcctctgtatcatgctattgcttcccgtacggctttcgttttctcctccttgtataaatcctggttgctgtctctttatgaggagttgtggcccgttgtccgtcaacgtggcgtggtgtgctctgtgtttgctgacgcaacccccactggctggggcattgccaccacctgtcaactcctttctgggactttcgctttccccctcccgatcgccacggcagaactcatcgccgcctgccttgcccgctgctggacaggggctaggttgctgggcactgataattccgtggtgttgtcggggaagctgacgtcctttccttggctgctcgcctgtgttgccaactggatcctgcgcgggacgtccttctgctacgtcccttcggctctcaatccagcggacctcccttcccgaggccttctgccggttctgcggcctctcccgcgtctacgctttcggcctccgacgagtcggatctccctttgggccgcctccccgcctg

SEQ ID NO: 819 - protein, 15 aa, Artificial Sequence
  Synthetic Sequence
  MISC_FEATURE (4)..(4): X at this position appears as "v" for SEQ ID NO: 819 in the Specification filed herewith.  This position is selected from A, C, D, E, F, G, H, I, K, L, M, N, P, Q, R, S, T, V, W, Y and null.
  MISC_FEATURE (11)..(11): X at this position appears as "w" for SEQ ID NO: 819 in the Specification filed herewith.  This position is selected from A, C, D, E, F, G, H, I, K, L, M, N, P, Q, R, S, T, V, W, Y and null.
  MISC_FEATURE (12)..(12): X at this position appears as "x" for SEQ ID NO: 819 in the Specification filed herewith.  This position is selected from A, C, D, E, F, G, H, I, K, L, M, N, P, Q, R, S, T, V, W, Y and null.
  MISC_FEATURE (13)..(13): X at this position appears as "y" for SEQ ID NO: 819 in the Specification filed herewith.  This position is selected from A, C, D, E, F, G, H, I, K, L, M, N, P, Q, R, S, T, V, W, Y and null.
  MISC_FEATURE (14)..(14): X at this position appears as "z" for SEQ ID NO: 819 in the Specification filed herewith.  This position is selected from any one of SEQ ID NO: 820, SEQ ID NO: 821, SEQ ID NO: 630, SEQ ID NO: 631, SEQ ID NO: 824, and SEQ ID NO: 825.
  MISC_FEATURE (15)..(15): X at this position appears as "a" (alpha) for SEQ ID NO: 819 in the Specification filed herewith.  This position is any four consecutive amino acids or null.
LTPXQVVAIAXXXXX

SEQ ID NO: 820 - protein, 7 aa, Artificial Sequence
  Synthetic Sequence
GGRPALE

SEQ ID NO: 821 - protein, 7 aa, Artificial Sequence
  Synthetic Sequence
GGKQALE

SEQ ID NO: 822-823 - skipped (2 entries)

SEQ ID NO: 824 - protein, 18 aa, Artificial Sequence
  Synthetic Sequence
GKQALETVQRLLPVLCQD

SEQ ID NO: 825 - protein, 18 aa, Artificial Sequence
  Synthetic Sequence
GKQALETVQRLLPVLCQA

SEQ ID NO: 826-827 - skipped (2 entries)

SEQ ID NO: 828 - protein, 4 aa, Artificial Sequence
  Synthetic Sequence
GHGG

SEQ ID NO: 829 - protein, 4 aa, Artificial Sequence
  Synthetic Sequence
HGSG

SEQ ID NO: 830 - protein, 4 aa, Artificial Sequence
  Synthetic Sequence
HGGG

SEQ ID NO: 831 - protein, 4 aa, Artificial Sequence
  Synthetic Sequence
GGHD

SEQ ID NO: 832 - protein, 4 aa, Artificial Sequence
  Synthetic Sequence
GAHD

SEQ ID NO: 833 - protein, 4 aa, Artificial Sequence
  Synthetic Sequence
AHDG

SEQ ID NO: 834 - protein, 4 aa, Artificial Sequence
  Synthetic Sequence
PHDG

SEQ ID NO: 835 - protein, 4 aa, Artificial Sequence
  Synthetic Sequence
GPHD

SEQ ID NO: 836 - protein, 4 aa, Artificial Sequence
  Synthetic Sequence
GHGP

SEQ ID NO: 837 - protein, 4 aa, Artificial Sequence
  Synthetic Sequence
PHGG

SEQ ID NO: 838 - protein, 4 aa, Artificial Sequence
  Synthetic Sequence
PHGP

SEQ ID NO: 839 - protein, 4 aa, Artificial Sequence
  Synthetic Sequence
AHGA

SEQ ID NO: 840 - protein, 4 aa, Artificial Sequence
  Synthetic Sequence
LHGA

SEQ ID NO: 841 - protein, 4 aa, Artificial Sequence
  Synthetic Sequence
VHGA

SEQ ID NO: 842 - protein, 4 aa, Artificial Sequence
  Synthetic Sequence
IVHG

SEQ ID NO: 843 - protein, 4 aa, Artificial Sequence
  Synthetic Sequence
IHGM

SEQ ID NO: 844 - skipped

SEQ ID NO: 845 - protein, 4 aa, Artificial Sequence
  Synthetic Sequence
RDHG

SEQ ID NO: 846 - protein, 4 aa, Artificial Sequence
  Synthetic Sequence
RHGE

SEQ ID NO: 847 - protein, 4 aa, Artificial Sequence
  Synthetic Sequence
HRGE

SEQ ID NO: 848 - protein, 4 aa, Artificial Sequence
  Synthetic Sequence
RHGD

SEQ ID NO: 849 - protein, 4 aa, Artificial Sequence
  Synthetic Sequence
HRGD

SEQ ID NO: 850 - protein, 4 aa, Artificial Sequence
  Synthetic Sequence
GPYE

SEQ ID NO: 851 - protein, 4 aa, Artificial Sequence
  Synthetic Sequence
NHGG

SEQ ID NO: 852 - protein, 4 aa, Artificial Sequence
  Synthetic Sequence
THGG

SEQ ID NO: 853 - protein, 4 aa, Artificial Sequence
  Synthetic Sequence
GTHG

SEQ ID NO: 854 - protein, 4 aa, Artificial Sequence
  Synthetic Sequence
GSGS

SEQ ID NO: 855 - protein, 4 aa, Artificial Sequence
  Synthetic Sequence
GSGG

SEQ ID NO: 856 - protein, 4 aa, Artificial Sequence
  Synthetic Sequence
GGGG

SEQ ID NO: 857 - protein, 4 aa, Artificial Sequence
  Synthetic Sequence
GRGG

SEQ ID NO: 858 - protein, 4 aa, Artificial Sequence
  Synthetic Sequence
GKGG

SEQ ID NO: 859 - protein, 460 aa, Homo sapiens
MFTIKLLLFIVPLVISSRIDQDNSSFDSLSPEPKSRFAMLDDVKILANGLLQLGHGLKDFVHKTKGQINDIFQKLNIFDQSFYDLSLQTSEIKEEEKELRRTTYKLQVKNEEVKNMSLELNSKLESLLEEKILLQQKVKYLEEQLTNLIQNQPETPEHPEVTSLKTFVEKQDNSIKDLLQTVEDQYKQLNQQHSQIKEIENQLRRTSIQEPTEISLSSKPRAPRTTPFLQLNEIRNVKHDGIPAECTTIYNRGEHTSGMYAIRPSNSQVFHVYCDVISGSPWTLIQHRIDGSQNFNETWENYKYGFGRLDGEFWLGLEKIYSIVKQSNYVLRIELEDWKDNKHYIEYSFYLGNHETNYTLHLVAITGNVPNAIPENKDLVFSTWDHKAKGHFNCPEGYSGGWWWHDECGENNLNGKYNKPRAKSKPERRRGLSWKSQNGRLYSIKSTKMLIHPTDSESFE
